United States Patent Application Publication US 2026/0191916 A1 - sequence listing, part 42

SEQ ID NO: 159 - DNA, 3996439 bp, Phocaeicola dorei (residues 1-1,998,220 of 3,996,439)
  source 1..3996439: mol_type = genomic DNA
ataacaacttaatcctgtcggttcattacggataaaacttttactgtgatagaataatgtttcttggaaatccattaacggaaaagaatacccctctggagttgcatagcgttccttaatggtttgtgctatatctcgtatacaagttttatcttttatatcatctaatgttattttatcaaaaacttcagttaagcgcttcatcatttgatatacagcggcaaaagaagtcactttagttataatattttctgtatattgtatttctaaagagggaattcctatttcttcgctgataaactctcgaactaacagttcatattcatttaaaggagattgaagttcttttaataaatattgttcaagataatgtttttgagagactaaggtcggatatttatagaagaaactattttctaatttaatatttaacagttcttcaagtttagaaacagccatcatactgcgtattgagtctcctcctaaagaaaagaagttatcttctatatgaatgaggtttgtttttaaaacttctgaccatatttttttgagaaccaataaataatccatattatgagattctttgtttagttttacaattgatttattatactgtccttgctcaaaatactttgccatagatcgacgttttattttagagctagaagttctgagtatttctcctttttttatctttatagagtattctggagcaaatccaactttgtctgctagaaatgcgttacattcatttattaattgtcttatttgttcttccgacatttttcttgataatacaaagaaatgaagtacaatttcacgattttctgtagaagaataaaaagatgtaaatacagttttttcaattgaaagaccaaatttctctaagacacaattttctaaatcaaaaggatgaaagttttgtccatttactataattgtttccttttttcgacctactatataaagaatattgttataatcaaaaaagcccaaatctcctgtacttaaccaaccgtcttttaatacttcatctgttgattgtatgtcattataataaccagacatgacacaagcgccttttacttgaatctctcctaaatttaaattattttgaggaataccgtctttaacaatgcgtacttgtaagcctggtaatattctacctgcactaacaaattcacaaaaatcttgttgtttatcgactaatttgataatcccttcatagaacgcctctctatttattcttatatttttatttccataacccggtaaacaggaagaaacaatcaatgttgtttcagccattccatatgaagggcggaatgcatttcgattaaacccaagttgaaaaaggggggataatcggacgtataaattagatggaaccatttctgctccaattgaaagagtcttcacttgagataaatccaattcttttatgtcattagattgttctaacttttgaattaacaaatccaatcctgaaggtgtcgtaccgccacaaatacttacttgatattcggaaattttctttagaaaaatcaaaggatctcttaaaaaggaaaaaggctctatttttatttctgtaatttggttatacaaacaaaccaaatgatttccaaatagaccataatcatgaaaatatggcatccagtgaatcaaagtatcttcagttgtaatttcatccgcaagagtttttattttcaaattagttaaaatattgttaaaactaagcatgactcctttgggtgcccctgtacttcctgatgaaaactgaataacacataaatctttactatctcttttaggtatgtgtaaagaataatcttgcaacaaatccaattgtttcataatatcttcaacacacacagctttatgaaatgaagatttataatattcaaatagattaatatcatttgttataagtgtaactacacctaatatatcaattgcattctttaggcgttcaaaagcaatagagttcttattactgaattgtacagaaggcattaaaacgggtatacaacctgccataacacatccccaaaataataatataaaattttcggatttttcaacagagattattatcttactgacaggctttacttgatagtaagattttaaaataaaagctatttttctagatttttctcgtaactctgaataagttagaaaaagatcacattgactattatttacaataacaattccttttgtcggcactttatgtgctgcttcttccaacaattcatataggttttccatcttgctttattttttgcccgcaaagttcgtttgtttagctaaatccatcaataccaattattaggtatttttaataaattgttgtatgcatataatattacttaaattatatatttctatttattgtgtgtagctatcgtattagtagtcagttgatattaatttatattagattgttatacataatcatttatgataaggaaatattacctacaaaggggtattatatgtatttttaccttcctattttttgtaaaatgataagttctttatatctcataaataactattgcttctttattaagacctagaaatcatcacatttaatatattactgatacgcaatgctctaaaaatatttagttatttactataacagtcaatgtatatttcaggtatacctgataatcttccattatcatctggtctattactgccaacggaacgtccttgttatcccggaatcatttgaagctgccgagtgcggtatggtagttcttggccgtaccgatgtgatttaattggcagagtcgctcgatgagattctccatgaatataaaaagggtattttctttttcggtgcaccggaactccataattatatcttcagatgaataacctcgtcgtagcagatcgaatctttcaataatcctgttcagcttttccaaattctcctccagttttcggattattgtctgaataacggttatccgttcgccagccggtgccgaaacaggtcttgactgtttatcatcccattcatgagagaacaccttataaccggttgtgatttgcctgacgacacggcggtgagttacaaaataaacgatagtgcccggacggccttcgactgttgacgggcggaatttcacctttactgttgtcatacttatatttatttaattggtaatgtttcattctcgtcttaacttgcggcatataaaaatggtcaacgtgacacagacaacgagaaaagcagcggtacagccgagtacttcccacagcaatatgctatgtataagacgagcgttcgcggcgcaggtacaaacgaaagccgccgcgagggagatgattgcctctaccatacaccagaaagcggttgcggagataagcacacggtcattcgccgagaggcgtccggctagccttgcgcattcccgttccatcctgtcggccatcttccggcagattttctctccctcctgttcaagcgtctttctcgcttcctcgccgagtgtgaccgtgcttgccccacgcagggaagaaacagccccgtccattttgggcagggcttccgaaagtctgttttcgagcttttccacgttggcactaagaatgcggacagcttcataattgtttttcagcgcatcgattatgcggtcttgctcctgcattttttcggcagtcggaagtgccccgtctatttccgagaaatcgaattttttattcataggctgttatctttttcgtcctgtcttcggtttctttccgattacccttgccgcttcacgggcgcaccggcgtgcccattcccgttcgtcctcgtcctcgcgtcttccccaaggcaggtcgttggaactgccgccaccacctcccgaaggaaccgccggagtatcgagcatcccgacgaaaagtgccgcagccatgtccgtgaggtcacggctgttggctgtctcccggtagtcgaactcgtcattgaatacgtccaacgcttcatcgggaatgaagaaccggcggctttccccgtcgatgtcgatatggtacgggctggtaccgggacgatagccggtgtattgcggaaccggtgtcgttccttgtgcgtgaaccggaatcgtccggggtgtagtcggtatagatttccctgcggcgggctgtgtcgaaacagtccttgtcttgggagccgcgtgcagctttttccacgtgctttcaagtttggtcgccatgaggttgcgccccctgccgagttcggaagccttgtatctggcgttgcctttcttcagcacgtaaccgcgcaatatcttcttgttgtcgcgcagctcccaaaactcatatcccttgctccggagtctggccacgtactcgtcccatgaccagctttccatggattgcagggtttccatgcagtcccggttcacctgcccgatgttcgtctcacgtacttcggcggcagtcgtccagccccgtttcagggccacacgctcggctgcccgctgtgcccgcaggtgtatgtcatggtcgttgttgatattcccccgttcgtcgatacggcagaacgcaccgtgaaggtggggaatgccgctcttggattccagatgcagccacaccgtgcccttgctgcctttgagggcggttttcggggaataggtcttgccgttcttgtcaagcagttcgatgttgtcgaactcatccgtgaagtcgtcccacaacctttgccagtcgtcgatggtaaagtctttggtgtgttccggcgcagggctgacctcgatgcggatgacggaatttttgacccgtttggacttctccagcgtcagccgcatagaatcccatatacccgtggcatccagaccgggcggcagcagattgtcccccacgtggaagatgcgttcgggatgtttcttgttcctcgattctcccgtgatgtacctgatgtcatttatcccgtgggagatggatttcgctttccctatcatggctcgtcctccctgtcttcaccgttccttgtcccgtcgggcaggcggttggaaaaccgtaccttgtcgagcacgtccgtgacacgctcggccagcctgccgagttccttgagccattcgagcatgaaagggtaactgttaaacatctgtctgcgcttttcggggttcatgccacggagcgcggacgtgtagttcacgaggtcgctgcggcatcctataagggtctccatgaccgcctcctgccttgccgtcagcctcgctttcggcctgtagttgaaagctcttgccagcacgtagctgctgacggtcatgccgcactcggcggcaaggcggcggatgtactgtttctgttccacggtgactttggctccgatgtattcggtgcggctgccgccggacggaaatgatgtgtcttgcttattgtcttctgtcataactgttgttttataagggttaagcggtgcgagcctgcgagcgccgccaccggcgaactgccagtgagccgcgagagcgccaagggatgactgaccgaagggaggtgataccttggcatatctcgaaactgaaagacgttttcacctctcctgcggcgtgcctccgctgccggataaaatgccattcaaaggccgttcagatgccgttcgaataccattcagggcgggattgcaaaggtttacgacgtggaagttctgaaagtccgtccattcctcgacacaggtcatggaagcgacggaagcggttttggaagcgtccaccgctatcatgcccagcttttccatcgttgcaaggagattgcggattctttttctccctatgttccattcctccgcgagtctggtttccgagaactggaactgtccgggctgcaattcctgcggcctgcggaatgaatcgcccctgccgggggacagtcgcatccgtgagagcaggtcataaaaaagagtatggttgccgattgtattgccgtcgtcatctttcgttgtccctccgagccattcgattgcctctgcggtaaagtggatgcggactgtacggaagccctgcggctttttgaaaagggatgtttccttgttcctcttgttttcttgcataattcaataaaaaataagggaatggagtatcggaaaacctacaacagtttcaatgagatagtgcgtgcgggagtttccttgtccgtccgataccccgttccggttttgacatcagttccggttcacgttggcggcgggttgggattgcaggtgtccccgtgcgtcctccaccgccttgaagtcggaagagattttcatcagcacgatgctgacgcggcagagctggccgatgtcaacgaaatccttgacggcttccaacagtttttgcgcacgttcctgacggtgtttcatcacggcctcgttacttgttccgttttctttggcaagcccgtgattgagaaagcggttgacagccaacatgtccgtcgcctcaatcgttgcggtatcgccgttgcccgtcccgtaaccgaccattacccgtatggaatcggcctcgtagggggaacagccgcgaagaaagtccagaatggtctgtaccttcgcgctgattacgggtctgctctctttctttctctgttccttgttcggggattcctgaaccgtggcattcctgatacccggttccatgttctttgaattgtccataactgcattgttctaaaaaaggttgatgaatcatttgtttttctcatgtgttaccagatagtgggatgcctcgctgtcgatctcgacctgcgatttcacccgtacccgtttcagccatgcgtcgaggtcttccttggcgaagaagcacagcttgccgcccggcttgtagtaagggattgcgcggcgcatcatcatcttgtagagatagcttggcttcagtccgaggtaacgggctgcttccgtggtggtcatcaaattacgttcactttccatatacgttcatttttattgttacttgtactttcgtagaatcggaatctgctgttttttcagacttttcctttcttctgtttccgatgcaaagttaagtttgctccaaggtgggccaatgggggacgaatggggaaagtgcatgaaaagaaaatgcgccataccgttgtgtatgaacggtatagcgcatagctataatgggaagataccgggctgaatggggaaacgacgggcggttatggggtacctttcagccgtcttgcgttttcaacggccttgtcgatggatttgcggaaatcttgattctctttggtggcagcattgttgcaaacatcgctgcggtgcttgtcgtagtaggatttggatatgccgcagcgtttcaggaactcttccgaccagagtttcccgcgctctcgcggcctgatggtacgggcgatggaaaacaccatgtaacagatgcgaaggttctctttcgggcgcacgatgacctcccgttcggtgggtttcaggttcaggaagttcacgaagtcgctgcccgacagatactcgaactggtagtcgttgcacacctcgtaaatgaacaggcacagggcgaggtcaacggtatccatccatgcggtggtctcttgcagcaggcctgcacggttcatgggttgccctccttcacgcgtctgatgtcggagatgatgcttccggcgattccttgcagacgctccaccagcacgtcgaggaataccggtttgaagcaccagacacagaaattccggtcacgctcctgctgccattccttatatgataggtttgcgtgtgcatgagcttggtcatattttgcctttgctactccgcactccgtgtcgagcgacctgtattcttccgaatccagaggcaggaaatccaaccggttactcattgccgaatactcgcgccaaagttctgtggcggctgttttcgcttcctcgtaccggtgttcaaaggggcttagatattcctcgaaaagggcttcaaagttcactgtctgcaacggtgtcctgtcgagtgaaaggtatttgttcgtttccgaaagaagggaagaagaaaagtccagaagttgtccggggttctcctttaccagacaggctgcctccttgacaagaaggttcgtgtcgttgaaatcctgatagaacagggacggcggcaaggcctgttcaaaagacaagacgccttgtccgtaagttgcaagaagcgtgttcacttcgtgcaaccgttgtgttatttgccgtatcatcataatcgtcaggaattgaaaaggtcgtccatcgtcacctcgctgtggacgatgcttctgttcttgccattggccacaccatacgtcgtgataaaggtatgaaccagtgtcttgttggtcttggtaagttccctgaacaaaccggaacggtcacgcaaccggcgttcgtattcgggcttgatacggtatgtgtccatgcagaatttcatctcgcacaggtgtatgatccggtcagcccgctctattatcatgtctatttgtccgccgggcattccttcctccttattgggcttgacctgccatgtggacaaggatgtagccatgccccttattcccaaagccgacttgatctgtttatgatgtctcatgcagacaagctcgaaactgctacccatccagtcgaatacatttccggaatcaagatgattgctccaccattcatcatcgtgtgagaggttgtcggcaaggaacttgaaatagaacagcgaaaagaaatccgtaagcctgtaaacggctccgcgacgtttgttgccgtactgaagccatttctctatcatatcggacctttcaaggttttttatcgccttggttatgttgctgctcttcgatgatagtgactggaatatgtccttgcttgtcattcccgattcgtgttcgctgagtagttgtacgattgacgtgtacaggtcggcattgtcgaaaagggcgttgtatagctcctcgaactccagtttcaaaagtgcgccttcattgaaaaacagccggtctatattctgggaaaggctcaacgcggggtcaagaaggctgtaataaaacggaacaccgccaagcaccatgtatgtctgggtaagctggtaacgatcccattcgatgcctctggtagcgagataccgctccgtctcattcagggtgaacggggacagatgcaggttacacgtcactctggcatggaggcctcccttgttggcgacaatcttgtctttcatccatgaggtcgcggaccccgtggcgataagcatgatgttccgctgtgacatggcccagccgttccagaagttttcaagggccgacacgaatatggattttcccgaatccatccaaggcatttcatctatgaacacaatccgtttacggtcagcgggcagggacgacaggtattcttcaagggcataaaaggcttcatcccagttgcttaaatgggagaacttttttcccgaataactgttgagcacattcaggaagttgttcaactgtctgcgggtggtcattccatgcgcaccgacatatttgaaatcaaactcccggtcgaaaaattcttcaatcaggaatgtctttccgatacgccgcctgccgtagactatgaccagctccgatctgtccgagttcaggcatctttccagttccgcgtgttctttgtcgcggccaataagtttatccatactttcatgttttgatgcaaaattacgcatttggaattgcccaagcaaattttagaaccacttatttgatattatctatgaaatattacgctgtaaattcagatataaggttttgtgaggtttatgaactgcgtccataaatctgaaattatctatccaaatcaagaagataagttcaggtttatgtatctgataaacagatatgccgagttttgacctcttcggattgaaatctggccggaaaggtcaaaattcggcaattattcaaataaggctgaaaacggtggtaatggagtacaacgcaggatgtcagccaaatacgttatcaaccagattcaccgcttcaactttcttgctgtcaacgattttcgcgtaaatctgcgtagtctttacgttggcatggccgagcagcttgctcgtggtataaagatccgcaccgagggtaagcatcattgtggcgaacgtgtggcggctcgtgtgggaactcattagcatagcaacatcaaatagaacagcgcgttagaaacataatctgttagaaatgagctacatttcattatctggcacacctttctgaaacggattcagacggaatgccgaatcggttccgtttcttaaccgttaacaggttgtttcggaaacctgccgtgttaaccggatgattgaaaaaagttctccgacgggttgtttttctatgatactcagtattttgcgtagcgatgaacgcttacattcataataactttgcactcaaaaaaatgtaggcgtatgaaaattgagaaattcaaggtcttgctgtttttgaagaagaccgaacccgacaagtcgggcaaagctcccatcatgggacgcatcacattgaaccggacggtggcgcagttcagcaccaagctctcgtgcacgcccaagctgtggaacgtgcgtgaaaaccgtctggaaggaaagagccgcgaggcggtggagaccaatgcgaaaatcgagaaactgctgctggccatccatgcggcattcaatgaattgcaggaacggaaacgcgatttcggcgctgcggacgtgaggaaccttttccagggaagcatggaaacccagatgaccctgctccggctgttcgaccggcacatcgaggaaacgagggagcgcatcggcatcgatgtgtgcgcgtcctccatgagcacctaccattatgcgcggaaaacgctcggcgagtttgtcaggaaaaaatacaaggtgaaggacatcgccttcggtgcgttgaacgaacagttcattcgggaataccagtcctatatcgaagtaaaatgcgggtattccaaccagacctcacggcatcatctggccctgctgaaacggatctgccggatagcgtacaaggaagggttctccgagcggtaccatttcctgcatttcaagatacccaagcagaaggagaccaccccgaaggcgttgagccgcgaggacttcgagaagctgcgtgacttggaaatcccggaaaagcgccgctccctcgtccttacgagggacctgttcctgtttgcctgttatgccggaaccgcctatgcggacaccatatccattacccgcgagaacctcttcaccgacgatgaaggcagcctgtggttgaaataccgacggaaaaagaacgaactgacggcgcgcgtcaaactgctacccgaggccattgccctgatagagaaataccgggacgatttgcgggagaccctgttccctaaccagctgtacagtacgcttcgggcgaacatgaaaatcctgcgcgtgctggccggactgacgaccgaactcgtctatcatatgggaaggcactcgtttgcctcgcttgtcacgctcgaagagggcgtgcccatcgagaccatcagcaagatgctgggacataacaatataaagacgacccagatctatgcccgagtcaccccgaaaaagctgttcgaggacatggaccgcttcattgaggcgaccaaagaccttgaactggttttatgagaaagggttgtaaaaacgagattggaaaaaaataaatgtagaacatcagctaaaatgaaccatcatgcgtagcactttcaagatattgccctatatcaataggaaaagaatcaagtccgacggcacgaccgccgtcctttgccgtgtgtccatcgacggcaaaagcatcctcatcacgaccggcatcttctgccgtccggaggattggaacagccagacgggaaccatccgccagccccgcgagaacaaccgcctcgcagaattccgcctgaatctcgaacgggcttatgaccgcctcctgaaagaacagggcgcagtcagcgccgaactgctgaaaaacgccgtgacaggtgtggcgaccattccccagacccttctcaaaggcggcgaagcggagcgggaacggctcaggctgcgtgccgaacaaatccattcgacttccacgttccggcagtcgaagaccacgcagctcaacctgcaacagttcctccagtcccgtggcctggaggacatcgccttttccgacatcacggaggagttcggccattcgttcaaactgttcctgaaaaaggaactgggttatgcctccgggcatgtgaaccactgcctgtgctggctgaaccgccttatctatattgcggtggatgagggcgtgctccggtgcaaccccttggaggacgtgcattatgagaagaaggacccgcccaagatgcgccacatcagccgcagcgagctgaaacgccttatggccacgccgatgccggatcccaaggtggagctggcccgccgcatgttcatcttctcctcgctgaccggtctggcgtacgcggacgtgtataacctgtacccccgacacatcggcaaaacttctgagggcaggctctatatccgcaagccgagggaaaagaccgaggtggagaccttcgtccccctgcacccggccgctcggcagattctggaactgtacaataccacggacgacacccgtcccgtgttccccctgcccaagcgggacatcctttggtacgacattcacgggctgggtgtcatgctgggcatccagaagaacctttcccatcacgccgcaaggcacaccttcggtacccttttggtctccgagggcatttccatagaaagcgcggcgaagatgatgggccatgccgacatcaacagcacccagatttatgcgcagattaccgactgcaagatatcgaaggacatggaccgtctgatggaacggcgcaacagccggaacgaaatgccaatggatgaataacaaaaaagtcaggaatcatggaacgttacattatcactttggacgaacacggcacacttcacgtgccggatgtttccgcaacagccatctggatgaatgaaccggaactgatggaactgttcggcgtggttgccctcacgctccgggcggcgataaaggccgtgtacaagagcggcatcctgaatcccggcgaagcggaacgtcgtgtccgccaagcggacgggtacgggatggacgtgctgtacggcctcccgttggtcattgcccttgccttccgccttcatacctgcggggcaaaacgtctgcgagaacgggtcatcggaaaattcacttgccacggtggacggaataccgcccgcctgttcatctttccggtcagtccgcattggcaaatggtgcggaattgaccgtattatcaactcacgcacaataaagcggcgcatcatgagaggattatctcccgtgatgcgccgctttcgtacattcctacaggtggccgggtcatttgcaagtgttttttgcaaataccggaaagggtggtccacttttcaatgcgtacacgacttctaccgccacctacatttttcccatgtccttctcaggttccgatacggaatgcctcccgataaccctccatcagcagccgttcgatatccgactcccggtacaggattttccctcccagctggatataagacatgcgccccgcatcccggtattcctgcaatgtccggcggcaggtcttcaacaatttggccacttcccggtctgtcaggtagcgttccccgcccaatacggggcggtagttttcggccaataattcaatgtggtccaatgcgtgctccagcattctgaacagcgcggccatctgtccgctttcccttgtcatcaattcgttcattgtcagtctgatttaagtgatactcatttaaccttcctcaaatagtttttcctttcaaggccgccagggtgcggcgttcctccaccagcggcacgatgcgccgcacgtcctccgcccggtagaacatcttgcgcacaatctgtgagtaagccagcgtgccgttgtcgcgcagcgtctgcaaggtgcgcgggctgatttgcaggatctggcacacctccgtgctgtccagccattcactgaggcgtttctcctccgccttgcggcagaacctgtccaccattccggccagccggttgaaacgcgccatcaattcctcaaaagtcttttgctcgattacgattacattttccataagattaccgtttaattgtgattatgccgcaaagtaaacggaattacgggcagagtccaccgcttgtcaggcgcgtggcagcatttggcgttgtcgtggcagccgttggcgttcttcgggtacatctatctccccatcattcctgttccagtccctgccccacaccttatatataatatatggtaaggcaagacaccttatgtaccttgagggatggaaacagcggcataaaagctttttcagacctgccggacgggacttttcaaaaaaatcattgccgactcggtaacgactatggaaaacgcctcttgcacaataccgatttttgcagcgtaatcatcaacaaggaacgatatggacacagagaaagtgaaacagaacccggccgtggaagcggcgggaagcagtggcgggcaagccgcaagaatcttcaagaaggagaatatcccgaagacggcggaaacggtcgggcgggacaccttcgaggaatggatgggacgcatcatggaacgtttcgaccgccaggaccggatcatctcggtgctggtgaacaaggatgccgccggagtgaagtacctggacggggaacggttgtacgacaaccaggacctgtgcgagatgctgaggacaagcaaacggtcgctgcaacgcttccgaagcaagtacaggctccgttaccaacggattggtcacaagacctattacaaggaatcggacgtgctggagttcatcagccaaaatatggaggaagtgctgcaaggcggtaccaaggtgctccgcatgaaagagcaacccggcatggaagccccaaagaacaaatccggcaaaagaccgggccacaagaagtattcacctaaaaaataaaagtaaaaatgatggcaacggaaaaagaaaacatggccatgacggctgaaaccagagaacagaaaccgagtatggccacctgcaaggaagccttggcggattacaggcggatttacctgcccgtgcctgccattgaagaccgcaagccggtattcctcagcaaggagacccgtgacaggctggaccggatagtccggttgttcggtgagcggaaaatgagcgtttcaggattgacggaaaacatcgtccgccgccacttggaaatatatgagaaggaaatagacgaatggcgcaagctgtgattttgataacccattaaaaaacatcgaaaaaaatggaacagaaaaagaaaaagcaagaggacgtgctggtcgtccgcgacgagaaaacgggcgagatcagcgtggtcgccgggctggacggcaagggctaccccaatacgaagcccgcgaagccggaacactcgcaggacttcctgcgcttcgaccgccacggggacatggtggacaatttcttcaagaacttctaccgccagtgcaaggagccgacgcgcttcggcttctatcgggtggcggcggatgcggtggacacgctgcttcccgtcatcaaggacttcctgaaagaccccgtggcaaacgcggagatacttgcctcgcacaaggtggacaccgccaagtaccagcaacaagcagaaacagagaatgtcaaacaagaaaaaaataacaacgaacccattaaaaagacagaagaaatggaaaagaaagaagaactgaaacaagagaaggatgttcagcagccacaggtagctgaaacacaggagaagcctaatctgatagcggacgaccaagtaaactgggaggaactgcgcaagtgcggcattgacaaggagaaactctcggaaaaggacctaaaagccctgatgaactacggcaagacgggattagtgacggtaaagccgaccttcggctatgagagttacgaattgcaggcccgattgtctttccagaagatggaggacggctatctgaagctgacaccccattttatccgcaatgaaccacgccttgacatcccccacaggggctacaccttcaccgaagaggacaagaagacgttgaaacgcacgggcaacctcggcaagcccgtcaacttcgccaacgagaagacaggtgaaatcaagccccactacatcagcatcgaccgcctgacgaatgaaatcgtggacatccctgccgacaaggtgcgcatccctaacaaaatcggacagaccaacctgtcaagggaagagcaggacatcctacgtgcgggattgcctttgcccaaggaagtgatgctctccaacgggcgcaagttccaagccttgttgcaggtgaacgccgacaagcgcgatgtggagttcgtgccgggacaaccgaggcagcagcaatcccagcgtcagggaaacggccaaggtaaggcgcaggacaattccaattcgccccaacagtcacaaggtgaagaagatgggaataaccagcaacgccgtaaccgctcgtggacaaacgaggacgggagcatccgccccatcaagaaatggaaagacgatgtgtttaccgaccagcagatagccgactacgtggcgggcaagacggtggtgctcgccaatgcgaaggacgaccaaggccagccctgcacgaagtacctgaagttcaacttcgagaaaggccgaccgctgacctactcgcagaaccccgacctcgcgcagaccgtcgcaccgtccaacgagagccggacacagctcgccgtgaacaacgaagggaagaccaacgaagcgaccaaacacgtgaaagagccgttgcagcagggtcagaccacgccgaagaatgatgcgcagcagaagcagcaggccaagaaatccaaaggcatgaaagtatcttcctgattgccgccactaaatccatccgataagtattgacgggctgaaacggggaacatgcaccgccttgtgcgcatatcccacaaacaatgccgtgccccgtttcatccccattaaagacaaaagtatcaacgaataaaaaaacagagaaagacatgattaccatattggcagaaaaaccgagcgtcgcccgtgagatagcacggattgtcggcgcgatgaaaagggaagaagggtatttcaccgggaacggctaccacgtgacatgggcgctggggcatctggtgcagcttgccctgccagacggctacggcatcaagggcttccggcgcgacagcctgcctgtcattcctaaaaacttcgagcttataccccgacaggtaaaaacggacaagggctacaaggcggacgcggcggcggtgaagcaaatcaaggtgataaccaagctgtggaacgaaagcgatggcatcatcgtggcgaccgactgcgcccgtgaaggcgaactgattttcaggtatttgtattcctatatcggctgcaccctgccgttccaaaggctgtggataagctcgctgacagatgccgccatccgcaagggattaaagaaactgaaggacggccgcgaatacgacaacctctatcaagccgccaaagcccgcagcgaagccgactggctggtaggcatcaacggcacacaggcgttgtcggtggccgccgggcgcggcacgtattccgtgggacgggtgcagacacccacgctgacgatggtctgccaacgtttttgggagaacaagcgtttccagcccgaaccggtataccagctccatttcaccacgccgtcggtgagcgtggatgaggtcgtgaagttcgcctcggtggagaaatggaaggacaaggaggaagccgccatactatataataaggtaaaggaacagatggcagcaaccgttaccaaagtcgaaaagagggaaaagatagagaaccctccgctcctgtacgacctgaccacgctacaaaagaaggcgaacacgaggcacggcttcacggcggaacagacgctcgccctcgtgcagaagctctacgaggcgaagctcgtcacctatccgagaacatcaagccgctacatcccggaggacgtgtttgacgaagtgcccatgctgttcgaccgtctggcaacccattcttcctttgcggagaagattggagccttggacggactgaaccgccgcagcgtggacgcctcgaaagtgaccgaccaccatgccctgttggtgacacccaaccgtccattggcgctctacaaggacgagcagaccatctacgacatgattgtggggcgcatggtggaagcgttctccccggagtgcgtcaaggacacgaccaccgtccgggcggagtgtgagggcatagcgttcgagacaaaaggctgcatcgtgcgcaaggcgggctggcggtcggtctatggcgaggacaacatagacaccgttttgcccgactggaaagaaggtgatatattggcaatgagcggctgttcgatgagttcgggcatgacacgcccgaagccgttgcataccgaaagcaccctgctggcggcgatggagaccgccgggcgcgagggcttggaggacgaggaagcgcggcaggcgttgaaggactgcggcatcggcacgcccgccacccgtgccgccatcatcgagaccctgctcaaaagggaatacatggtgcgcgtgaagaagtcgctcgtgccgacggagaaagggcttgccctgtattccatcgtcaggggcatggacatcgccgacgtggagatgacgggacgctgggaggcggaactggcggagatagaaaaaggcaggatgccgcacgaggcattcatccgcgacattgaaagctatacccggaaaatcaccacggaactgcttgcctcggacaagctgttcgggcacaaggcatcggactgtgcctgccccaagtgcggcaagggtacgatgcagttctacggcaaggtggtgcgctgcgacaacccggactgcgccctgcccgtgttccgccagatggcgggcaggacgctcaccgacgcggaaatgaacgaactgctggcaaaaggcagcacgggtgtcctcaacggcttcaagagcaggcagggcaagccgttcagcgcaatggtcacattcgatgcggatttcaatacaaaattcgtgtttcccgaagccaaaggcacaaaaaaattcactaacaggaaaggaggaagaaaataatacgtaccttttaataaagtaagctgcatctcggaataaaaaataagcgagcttattttgttctcccctcgatttgcattacttttgccactgattcatgtcataatctgtttcaattcgttgatactcgttattcacatggatttagtggcggcactcggagggataccgggtgcctttttctttctttccggcaaatgccggacaagccggcgaaaagagaggtacaggtcggcgggctcagcctcacacagccggtgaaaagagtaacggacatatctataatcatttatccactaaatccataaaaagatgaaacagaacaagaaaaccgttccagtggaactgtcctattacgggctgtacctgctggactacctgagaaaataccatcctgacaaagcatcggataccggtttcattgccggacgcgaggaagcagccaccgccaccttcgagaaggaaaggctggcgggcggcacggtggaggacgcccacgaggaagccatgcgcgtgctgctcgaagggctgcacttctctccctacgccctgctgacggaggtcgtggagagggaatttgccgacgaggtggcggaacaggagcgtgaactgttctgccgcaggctctacccccacctgaacaacctgtttgccggttacgacacgtcggacgacaccttcgccctgtcgcccggacacgacctgctctacacggagctggtgggaaccgtcatgctttatctggagtcctatggcgttcaataggaaacagaagatgcgcgacaacatcgaggcggtacgcacggcgttcacgctggaccgggagcggcgcacacccaccgagagggaacgtgcgctattagagcgttactgcggcttcgggggcctgaagtgcatcctgaacccggcaagggaactggcggacgccgcgcgttgggcgaagtccgacctcgaactgttcgcgcctacggtggaactgcaccgaatcattagagagaacagcaaggatgaaacggagtacaaacgctacgtggactcgcttaaagcctcggtgctgacggcgttctacaccccgaaagcaataaccgacaccatcgcggacgtgctgcacgacaagaaggtgcgccccaacctcgtgctggagccgtcagcgggcatgggcgcgttcatcggctcggtgctgtcggacaacccgcaggcggaggtgatggccttcgagaaagacctgctgacgggcaagatgctgggacacctgtacccgcagcagaagatacgcacggagggcttcgagaagatagaaaagccgttcctgaaccgttttgaccttgccatatccaacatccctttcggggacatcgcggtgttcgacccggaatatgccaacggctcggtgttcaagaagatagcggcaaggaaggtgcatacctatttcttcctgaaagggctggacgcggtgcgtgacggcggcatcgtggcgttcatcacctcgcagggggtattgaatacggaaagcaacggcggcacacgctacatgatgacaaggaaagcggacttggtgtccgccatccgcctgccgaacaacctgttcacggaagatgccaacacggaggtggggtgtgacctgataatcctgcaaaagaatgaaggcaaggaggaactttccgaggaagacaagaggttgggcgatgtggtaaagagcaaccacacgaacattgtttccaacgggtatttcctcgaccacccggaacgcatcatccataccgacgcgaaaagggacaccgacccttacggtaagcccgctatggtttatacgcacagcggtggtgtggagggcatcgcaacggatttgtaccaaatgctgtcggcggacttgtcggcacggctggacttggaacgctataatggcatcaaggaaaaaaggcaggagactcggcagacgattgtcgtacaacctatgcagacggaggcgaaaaaagaagaaaagtcggtacagttgaaagcggaaccggtgcaagccgtggctcaggaggtggaaagcaaacgccccgaagccccggttatggacttgtacgacctgttcggctacacgcaggaagagcggcggttggcggaacgggggctgaaaccggaacggaagaaaagcggtaagtccaaagggaagaaagccgtacagccaacattgttctccctcccgaagagcggaaaggaggaagcggcgaaaaaagaaagcggaaaagtgaaagccaaatccacagaagcggcttccgacatcacgtccttgactccggaagaagcgcaggaaatggaggaaattatccgcaacaggatggatgtgccgcaagcgtcccgacaggaaaccgtttctgccacttcacccgatgtgaaagacgcttccgaaaccacagaggacgatgacccggaggatgccatctaccgcagtctggactgggagaccaacccgcccatcaacggcttctatgaaatgatgatgtcgctcacgccggaacgccgggcggaactgcgccgcctcggtcgggagaagatggatgccaatgcagccaaacaggcggaaagggcggcggaggcgaaaaaagaagaaagacaggctacggaaatggagcaaccatcgtccgtgcgcccattttatcccgttgagaacggttttgaggcggaagggaaagcgcaaatcgagcgtgtggaaagggaaatgcgcgaggaagaagccgccttgacacccgaagaacggcaacgccggaaagaggaagcgatgatgccacgcccgttcaagggcatcatggagccgcacttgaaagacggctctctggtatgggaacacacaggcggcgtccgcttccaaatcggggtgctgagggatgtcaccaggtacggggcgactttccagccgctcgacatggaggggatgcaggcgcagaaggcacagttgtacatcgacctgcgtaacacctacgagcggctctacgtccacgaagcggagaaccacgaggaaaacgccctgctgcgccgcaacctgaacacctactacgatgagttcgtcatgcgctacggcaacctgaacgccaagcacaacgcaaagttcatcctgatggacgcttcggggcgcaacatgctctcgttggagcgcggcgaggacgggcagtttgtcaaggcggacatcttcgaccgtcccgtttccttttcgcaggaaacattggtcgaagtggaatcgcccgaagaagccctgtccgcctcgctcaacctgtacggcggcgtgaacctgccctacatggaatccctctgcgacctgccgcaagcggagatgctggaagccctgaaagggcgggtgttctacaacccgttggcggagggctacgagattgccgaccgcttcatcgccgggaacgtggtgcagaaagtcgccgacgtggagggctggattagggaacacgagggacacgcaatgctgccgcaggcgcaggagtcattggcggctttgcgcgagaatgtgcccgaacaaatccccttcgaggacttggacttcaacttcggggagcgttggatacccacgggcgtgtatgccgcctacatgagccgcctgttcgacacggacgtgcggataacctactcggaaagccttgacgagtattccgtgaactgtgcctgcaagacgatgaaaatcacagacgagtttctggtaaagggctattaccgcaactacgacggcatgaacctgctgaaacacgcgctgcacaacacctgcccggacatgatgaaaagcatcggcaaggacgaaaacgggaacgacatcaaggtgcgcgacagcgagggcatccagctcgccaacgcgaagattgacgaaatccgaaacggcttcaccgaatggctggaagaacagtcgccggagttcaagaaacgcctgacagatatgtacaacggcaagttcaactgcttcgtgcgcccgaagtacgacggctcgcaccagaagttcccgggcttggacctgaaaggcttgggcataaaggacttgtacccctcgcagaaggattgcgtatggatggtgaaacagaacggcggcggcataggcgaccaggaagttggcggcggcaagacgctgataatgtgcgtcgcctcctacgagatgaagcgtctgggcttggcgcacaagccgatgattatcgggttgaaagccaacgtgagggagattgccgagacctaccgcaaggcttaccccaacgcccgcatcctctacgcctcggagaaggacttttccgccgccaaccgggtgcgcttcttcaacgacatcaagaacaacgattgggattgcgtcatcatgtcgcacgaccagttcggaaagatcccgcagtcgccggagttgcagcagcgcatcttgcaggcggaactggacacggtggaggaaaaccttgaggtattgcgtagtcagggcaaggacgtgtcacgcgccatgctgcggggcttggagaaacgcaagttcaacctgcaagccaaattggaaaaggtggaacacgccatcaagacgagggcggacgacgtggcggacttcaagcagatgggcatcgaccacctctttgtcgatgagagccaccaattcaagaacctgacgttcaacacgcgccacgaccgagtggcggggctgggcaactccgaggggagccagaaggcgctgaacctgctgttcgccatccgcaccatacaggaacggacgggcagggatttgggagccacgttcctctccggcacgaccatatccaatagcctcacggagttatatctgctgttcaagtacctgcgcccgaaggcgttggagaagcaggacatccgctgtttcgacgcatgggcggcgatattcgctaagaagacgaccgactttgagttcaacgtaacgaacagcatcgtgcagaaggaacgtttccgctactttattaaagtacccgaactggcggcgttctacaacgagataaccgactaccgcacggcggaggacattggcgtggaacgtccgaagaagaacgagatactgcaccacattccgcccacgcccgaccaagaggtgtttatcggaaagctgatgcagttcgccaagtccggcgatgcgactatcttaggcaggccgccgctgtcggaaacagaggaaaaggcgaagatgctcatcgccacggactatgcccggaagatggcattggacatgcgcatgattgacccgaattacgaagaccaccccgacaacaaggcgagccattgcgccaagatgatagcggaatactatcataaatacgatgcgcagaggggtacgcagttcgtgttcagcgacctcggtacattccagccgggcggcggatggagcgtctataccgaaatcaagcgcaagctggtggaggactacggcatacccgcccatgaaatccgcttcattcaggagtgcaagaccgagaaggcaaggaaggcggtcatcgaggcgatgaacgaggggcaggtgcgtgtgctgttcggatcgacgagtatgctcggcacgggtgtgaatgcccagcgcagggcggtcgccatccatcacctcgacacgccgtgggtgcgacatgaagtcgcatagataattgttggaatgatacttacgggtatcagctttaacccgctgttccgtcagcggtagcctaccaccgatgcaccttaatagttgtattaagcggttgggacaaagtacactttcgcaagacaagacagaaccgtgaggggaagtcaagtacggttagtatcataccgtagagtggcgaggcaggatagtatggttagcgcaagcgaactgttagtaaacttcgtaatgtcacgaaagagtgtaagatactggtacactctacccaaaagggaagcggtcggttaatcctttccatggtaggattacacggatataagcaccgccggaggatgagacagaacctaacctatccgttagttatctatgtggaacatggtaagcctgtatatctcctgccatgtaaaaatggcaggtaagctgacagcaatgaaagccgaatggtgtgcaggtataagataacagaaaaagcgaatgccgttctgtaatggaacggatacggattgaaccgacatcacgggctgatgtaggcgacatcatccgacacgaaagtgggcagacttctgtggcgacactcggtaggcaaaacaaaccgaatgttgccaaatggtgattctttacaatagacttttagaacttttttaaagtaggaatgcaaatgaacgataaaatcaaagaaaaactcctcgaccaatcgtgtgcaccgactgataacttgcaaacgaattgggacaggatagactggaccaaagcggagcaggctgttaagaagcttcaagctcgcattgtaaaggctcagaaggaaggcagaacgggcaaggtgaaagccttgcagtggacgctgacccactctttttacgcaaaagccttagccgtaaagagagttacttctaacggaggtggtagcacccccggggtggacatggaaacatgggagaaacccgaagcaaaaacacaagcgataagtgagctcaaacgcagaggctacctgccgaagccattgagaagagtccacatcaaaaagagtaatggcaaactgcgaccgttgggaataccgacaatgaaagacagagccatgcaagcactttacctcatggcattggaaccagtgtcggaaacaacagccgacacacgttcgtacggtttccgcaaggaacgtcgctgtatggatgcggtacagcaatgtcataacattctccggaaaggctattctcccgaatggattttggagggtgacataaaggggtgcttcgaccatatcagccatgaatggttgcttgccaacatccctatggacaaagcaatactccgaaaatggttgaaatgcggctatatcttcaacaaacagatgttcccgacagaggagggaacgccacaaggtggcattatctctcccacgcttgccaatatgacattggacggattgcagaaagtccttgcagagaaatataaacgagttagaataaaaggcaagttatattcgccaatggtgaatcttgtccgctatgctgatgactttataattacctgcgagaaccgtgaaacacttgaaaaagaaatcaagccattggtagccgactttatgtctgaaagaggtttgaccttatccgaagaaaagacggtgataaccaacattcgtgacggtttcgatttcctcggtttcaatattcgcaaatacggcaatgaaatattgacaaagccgaccaagaaagccgaaaaacgctttatggaaaatatccgtaaggttacaaaaggtcataagggttgcaagcaggaatcattaatcagaatgttgaatgctaaaatccgaggatggggagcatattatcagcatggggcgacacgtgattcttttcacagaatcgaccatcagatatttctcgccttgtggcaatgggctaaacgccgccattccaagaaaggaaaacggtggataaaagaccgttattggcacaatatccgagggaacagctggacttttgcggctaagttcaagaaatcaaacggcaaggaagaccaactcactttgctgaaactggcatcttcgtttcctttcctgcaatatacgcagataaaaggggatatgaatccgtttgacgcagactgccgcctgtacttcaataaaagaatgaagtcaaagatgcttgtgacactgaaaggacgtaagtccctgctttacctatgggaaaagcaagggcggaaatgtccgatatgtggtgaaccgattgacacgtataaggcatggaacgtaatgccaaccgtccaagacggacggaaatgcaatctgttggttcatgatgaatgtttcaaattatcccgtaaaaacaatggaaacaagaagtaggatgagccggtctctgcacacgaacagagactttgaaaagcttgagccgtatgaggggaaaccctcacgtacggttctgaggggggaagagggcagtaatgcccttgacctacccgatcggccgtccgacctcgcccagcgtgacggacgggcggtcaggaaaggcaacgagattgccaagctgtacgcggacaacaaggtggacgtcatcatctatgccgtggagaagtcgctggactcgtacaagttcaacttgttgcactgcaagcagacgttcatatcgcagttgaagtccggcgcgatgggcgcacgaaccatcgacgagggggcgatggacgagaagtcgggcatgaacttctcagaatacatggcgatactgtcgggcaacacggacttgctggacaaggcgaagctcgaaaagaaaatcgcctcgctggagggtgagcgcaagtcgttcaacaggggcaagcgcgattctgaactgaagctggaaagcaagacaaccgctctgcgcaacaaccaagccattatcgccgccatgacggaggattgggagaagttcaccgctgccgcacagatcgacaaggacggaaaccggctcaacctgataaagattgacgggctggacaccaccgatgaaaaggccatcggaaagcggttgcaggatatagccaagaacgccacgacaggcggagtaccccagcgtatcggtgaattgtacggcttccccatcaaggtggtgagcgagcggacgctcagcgaggggttggagttcatcgacaaccgtttccatgtcgagggtaactacaagtacacctacaacaacgggcatttggcgatggcggacacccatgccgccgccttgaacttcctcaatgcgttggagcgtatcccggcgattatcaagcagtacgaggaaaagaacgaggtgctggagcgtgagataccgcagttgcaggagatagcgggcaagacgtggaagaaggaggaggaactgaaacaactgaaatccgaactttccgctcttgaccgcaagatacagttggaactggctcctaaacaagagccagtactggaagaagacggaaagggaaaagaatcccagaaagaaagtctccatgccggggtatctcatgaaatcgtcccgactccgccatcagacaggcacacttggcatatccgtccggaaatgcaaacggaggcacctttaccgcaggtaaagaaagtgaggatttgaggcgcttggataaaaacagttaaggggcatacgggaggacaaccgtatgtccccggctcacttatattttatcagcaaaaaaaacgattattatggcaacaataaaaatcaagttcaggtcctcttcggtcgcaggcaaagagggcacgttatgttatcaagtgatacacgggcggcagacccgcctgattagtacggggtataaattgcacctttatgaatgggacaaggaagcgggcaaaatccgcagcgtgaaaggcaatccggaccgggaacgctatctggaagccttgcgtttccgtatggaggaagaccagaaacggttgaacggcattatccggaagctggaacagtcagggaaactttcttccgagcagatagtccttgcctatcacagtccggaaggacatgacgactgtttctttgtctatgcccggaaagtcatcgaccagaccaaacgcatggggaaagagcggacatccgaagtctatgccagttcactcaacagtttcatccgtttccggggcgaagcgggagatgtacctttggatgcgatggattccgtcatgatgatggaatacgaggcttacctgaagcagaacgggaaatgcccgaatacggtatctttttacttgcgcaatctgcgtaccttatataatagggcatcggaggaaggattggtggaaaaccgcagtccgttccgccatgtccatacgggagttgagaagacggtcaaaaggggcgtatcctcagaaatcatcggacggatcaagaatctggatttggaattatatccggccttggctttcgcccggaacctgttcctgctctgcttttatcttcgcggcatgtctttcgtggacttggctttcttgaaaaagaaagatttgcaaaacggcgtgcttgtctatcggcggcacaagaccgaccaacagctttgcatcaaatgggagcagcccatgcaggaaattgtccggaaatacacaaatccggattctccttaccttcttcccatcatcaaggtgccgggagaaaaggaaagacggcaatacctgaatgcctcgcatgtgatgaacaagcggttgcaaaagattggccggatggttgaatgtcccatcaagctcacgttttatgtcgcaaggcatgggtgggccagcatcgccaagagtcagaatgtgcccgtgcctgtcatcagcgaggcgttagggcatgattcggaagatacgacccgcatctatttggccctactggattcttcggtggtggacaaagccaacagcaaggtcatccggtctattggcagataagaatgattgggtacccccaaacacattttgtaagttgagagattccccttgaacctttcccgttcagggggatttttgttggacaaagtggtaaatctctctttaagagatgtttcgcacgccgcaaaattacaaaaaatactgcaatccacacaggatgaatcctgaaaattacgttttgggcgaaccttcccacaggatttgttcgacaaaagaagaagaattgtttgacaaataaaagtgtatgaattaacaaactgtttattttcaaataaatagcaggttggatacatctcttaaagagagatgtaccgattcaaggcctgagagcgcgatgtacattctgtagtggtagcctcattaaaggtacagctatcctttgtatataagcggattagggggggaataaaatgcgaatcgacaagaaaaccgttgggaaaaaggcttggcggtagaaagtggatttgttcgacaaatcggtgtatctctccgtaagagatgtatttcgcatgcaaagttacacacaattgttgggaaaacggtgataaataccaaaaaagttaagaaatgaatagtttccaatacgtccttaaaaaggatttgtcgaacagttgtttgacaaattgtaattattacattttatacttcattggatatcacctaattatctccaattgctaaacatgatacatctcttacggagagatgtaccgataatgtacatgatttcgagtctaccaaagtacgattgaggtcatgccgaaataagataatgatagcatatataatgctggggaatttccccgaacttttggataataccgttgtaactacatgtgtttcaatatataataaacacttggaggagtcggaaatgtatcccttcaccaactaaggcgtaaggctatccatttattatcatggacgaaatactacctatagaggataaactgcactggtatgccatgcgtgacctcaaacgcagacatgccaaattgcccgcctacaagatgttcgagaacttgaaggtgcagtgtttcactcctatggtgcatcgtttggtcgtagttggtggcaagcgggtggatcaggaagtgcctttcatgcaggacttgcttttcgtgaaagacacgagggagcatcttgatgccattgtggagagtacccccaagcttcaataccgttacaagctcggtgtacagcacactcctatcatcgtccctgtcgcagatatggaacgtttcatcaaggcggtagaagccagtgataatcctaagttctattcccctgacgaggtgacaccggagatgagaaaccggaaaatccgcatcatcggcgggcagttggacggatatacgggcacattggtgaccacacgtggttcgaagacaaaaaggctgctggtggaactgcccaccttgttggctgcctccatagaagtagaagcggagtatattcagcttattccatgaggatatgaaccgattgtaaatttttccctaacaaacaggaaaaatcaatcccccttgcgaccgaaaattaatgctattataaattgatttaatcacaatttcaatgaacaggttcggcatagagcttggcaagttgatggagaatcatctgtcagacatacttttcagtgagcgttccaatagagagcatattcatctgtaccgtgttgataattattgggtggcattcgaacgttctgcttttcacctttgtcacatctatacgaaatcggttattaatgcgatgaaagtgtttcgtgtgcccctccctattgttgtgacaagtgtagaggacagggaaatgccatttgccgtaggtgacatggagtgtatgaaaagaacatttgtagaaaggatatacaagacaggaaagccagttgacggcaaatcattcaatgaatggcactaccaaaacaccatagtatttcaagacacaggctatagaaggtcttaaacaaagaaaaatcaggaatatgagtataaataaagtattttacatcttgctcattgtcgcaagtacagtgacactgggctcgtgcggttcttccaaggaagtagtttatttccaggatttgagacccggggaaacagaaatcaagttgcctgaagtgaaagccattacagtccgaccggaggataagatttccattatcgtcaacagccgtgacccccagttgacggacttgttcaacctgccttatgtgtccaggcaattgggtcagtctttaaggacaaatggcgtgacggcttcaagcaatcaaggagtatccgcttataccgtagatgccaacggtaagatagattttcctgtacttggcaagatacacgtggccggaatgaagcgggaagaaatcgccgaatgtatcaagaacgaattgataaaggagaatttggtgaaagaccctgtcgtgaccgtggaatttgccaatctctgcatatccgtgttgggcgaggtgaacagtccgggacgtttcagcattgaccgggacaggctgaccatactcgatgcactcagcatggcaggcgacctgaccatctacggaaaccgttccaaggtgatggtgttacggcaagaaggggatgtgcaacgggtgtacggactgaacctcacttccggcgaacacatctattcttcacccgcctattatctgcaacagaatgacgtggtgtatgtggaacccaatgaagtgaaagcccgtcaatctaccgtcaacggcaacaacgtgcgttccacctcgttctggatttcgctggcatcgttgctgacttctgtggccatcctcatttttaattaatcacgtccaatctaaatattgtatatcgtggcaactcaaaacaatatatccaaacctaaacagaaggaacttgcggagaagataggcgtttccgcttcccagttgagccgcattgtcagcggcgaaacaagaacggtaagcagtgatattctcataggtgtggcaaaggaatttaaggtatcgacagactacatactgggcttgtccaccgtgagcgttcgtaaaagctacgatatttctgaattaggcttgtcagagggagccgtaagagggcttgtgacgggtgctgttgatgtgcaaatcctcaatcgcctgttggaacacaggagttttcccaagctgatagatttgatacggatttattttcaggatacggcggcaaagggcataacagcaagaaaccagcttatcgagatggcaacggcttccctgtccgacctgatgaaagaacacccggaacaccgggcagaagcgaagcaggatttacagcttttgaacgcccaaaagatgggggaacatgaagcggagattgaaaaaatcaaaaatgtgttcctggctatcctgcgggatattaagaaagatattgacaacggggaacagccgggggaagctgtgaccgccgctatgttccaagccatgcgggacgcactggcggaacagaaacaaaaaccgctttccattgacgatgtaacggcgatgatagccggacagatcggacagcttgcaccgatggacgaggaaaccgccgacctgtttcagcggttagtaaagaaaatgattgaacaggcagagaaataaatgtaggagaatattagaaaatgggaaaaagcaactcgtactatatgcagcttcatgtagaagcactgtttacaatgaatgaaaagaacgaacttatgactataagggaaccatgggactccacttcacagccggctccccgcttctatttgacaagaccactttacgaaaaaccacatacttattttcgcgctgacgtaccgaaagaattaagagaaaaactacaatcaattaccaacagagagccagtactgatgctgccgaatgaatcacctatttatgataaagaatatcggcaactattaggagaaagtaagatttcagaagatgcttgtttttggcttcctgaacagccaaagttaaaagcctgcctactcactaaagacaacattgagcctcagatgagccactattttccctggctacctgaagagttgctggatgttcccttttgcgctgcttatttggaagattctcaagtcgtatctatttgtcgtagtgttcggattattcttgaggcagaggaagcgggaattgaaacggctgaactttacagaagaaaagggtatgcattccacacacttgcagaatgggcagaagcagttagacgaaatggtagtattcctttgtatagtgcgtccacttctaacttagcctctttaggtttagcaaaaaaggcaggcggcattttctttggtaacggtttttgcgtttgctgatttatggttttggggtataataaactgtttgaagaagaaaagaagcggctaaaatagattgcggagaagttggacttgccgaaaaatccaaacccacagcggggacggaaaaagaaatagagaacagcaaatcgaaataggaggagtgaaaatgaaccaaggaagaattattgtgattacaggttcgccgggaacaggaaagacaacaattgcgtcgattgtcgcaaaagaatcgaacatggataaatctgtgcatatgcacacagacgactttttccattatttaagcaaaggagcaataccgccgcatttatcagagtccaacgaacaaaatttagttgttattgaagcctttttagaagctgcaaagcgctatgcccgcggtggatatgatgtaattgtagatggaattgtagggtcatggtttttagaaccatggagagcccttgttcgagaagattatgaagtacactatattgttttaagagccagtaaagaagaaactatgaagcgagctgtggagcgctcaaaattagacagaaaaacaaatgttgaattagtagaaacaatgtgggagcaattttgcaatctgggaatatatgaatcgagtgttgtagatacgaccaattattccattcaagaaactgtttccgcagtacaagaaaaaatcgcaagtagggcagcgttgttgtcttagatttttttgcttttttgtggtatattatcctcagacagagctaaaagagagagcggaacatgaaaagcgattattcaaaagaaagcatcacagagtttttaagccgaaagtacggtgaggatataaggctttttccgataaaagaagggcaggagtcacaggcgtattggttttcgcgtggcggcagagaatatgtcgtgcgcataaattcaaatatggaaggcttcaaaaaagacaaatacgcctatgagcacttccgctcggatagagttcctattccagaggttgttgaaacaggcaactttgacggcacgcactacttctgcatcagcgtaaaagcggacgggattacatatgaggactccgatgaagaaacggttgtgcgactgctcggcgatattacggatgtaaccgaagcaatatcgcgaaccgatatatcaggcacttccggctgcggcgtgtttgacagcgatacgggaaacgctccgttttacagctggagagaatatcttgcggaggtattcgagagagactggacggcggtaagcaggagctatgttaacctctcactcatcgacgagcttctcgcggcatatcgtgagcttatatcttattgcccggaagaaagagcgctgttccacggggatttcggctcgaataatgttatcgtaggcaaaaaatcgaggataagtggcgttatagactgggactgcgcggcttacggggactttctttacgacatcgcgaccgcgtatttttggcggacatggctcatgtgcatggaaaaaactgcggcgtattgggagagaaaatactctcacctgccgagatataccgagcgaattttatgctatgagctgcggatagggctgacggaaatatacgaaaacgctgtcgaaaacgatactgagacaacagagtggcttcaaaacaggtgccgcgagattttgagagaatacagacaaagaaaggcatgataaaatgagaatactgttcacaggctttgacccgttcgggggagagaaaatcaatcctgcgggagaagccgtaaaaatgatgaaaaacgaaatacaaggcgcggaaattttaaagctcgaagtgccgacggtgtttggaaaggcaggagaggttcttaaaaaagcggtggagcaatacagacccgacgcggtggtgtgcgtaggtcaagccggagggagagccgccattactcccgagatgatagccgtgaacataatggacgcgcgcattcccgacaacgccggaaacaagccgtgccacgagcttataataaaagagggaagagaagcgtatttttcctcacttccggtgaaggatatcgagaaaaatctaaatgataacggaattccgtcgtcggtatcgtatggagcggacaacgagtaaaagagtgaccgccgagataacccattgctcggcggtgttcctttccaagttaattgcgtgatatagattgaaaagtggatagatttatgatatagtggatagatttatgatataatgagttatcaacaaatcggaatttgtggaggtaaaatatagatgaatcaaggtagaattattgtaatcacaggtgcgccggggacaggaaaaactacaacggcatctgctgttgcaaaagaatcagatttggaaaagtctgtgcatatgcacacagatgacttttatcattatttgagtaaaggggcaataccaccgcatttgccagaatcaaatgagcaaaatttgattgtcattgaagcgtttttagaagctgcgaagcgatatgctcgtgggggatatgatgtaattgttgacggtattatcggaccgtggtttttaaagccgtggcaaagtcttgttcgggaacattatgaggtgcattatattattttaagggcaagtaaggaagaaaccttgaagcgagctgttgaacgctcaaagttagaccgaaaaacaaatatcgaattggtagaaacaatgtgggagcaattttgcaatctgggaatatatgaatcgaatgttgtagatacgaccaattattccattcaagaaactgtttccgcagtacaagaaaaaatcgcaagtagggcagcattgttgtcttagattgttttggtgcaattcccatttatcgagcagatgaagttggggagccgcctggaggcggcggtgccgaaggataaaataggagatgttaaggttatgaataatgaatacgataatgagaagttttttgaagaatatgcaaagatgtcccgcagtaaagaggggttaaaagctgctggtgaatggcatcaattaaaacctttgtttccttcgttagaaggaaaatctgttcttgacttggggtgcggatatggctggcactgcaagttcgcagaagaacaaggagctacaaaaatattagggatcgatttaagtaagaaaatgattgaggaagcccaaaagcgcaattcaggaaatcaaattgaatatcgtattagcggattagaggaatatgactatccagaaaatgaatgggattgtgttatatctaatttagctctgcactatatagaggacatagtggaaatatttcaaaaagtgtataggacattaaaaccaggtggaatttttctttttaatatcgaacaccctgtttttaccgcaggagttgggcaggattggatttatacagatgatgggaaaccgcaatattgggcgattgataattactttataacaggagaacgaaatacacattttttaggatgtgatgtagtaaaacaacatcacacacttacacagattataatgggattgctgaacaatgggtttgagcttaaagttgtagaggaagcagactttttagaagaatttgatccacgctataacgaagaaggtgtatcagaacttgatgaacaatttgagcggttgccagacggacacgaagcaaaacgcagttactatttaggcttccgacaagcacaaagtgaagcaagaccaaacattgttattagtctattgaagttaaattagatgctaaaaatttgtaattaagaaggagtgattacatgaacaaaaatataaaatattctcaaaactttaatataaaatattctcaaaactttttaacgagtgaaaaagtactcaaccaaataataaaacaattgaatttaaaagaaaccgataccgtttacgaaattggaacaggtaaagggcatttaacgacgaaactggctaaaataagtaaacaggtaacgtctattgaattagacagtcatctattcaacttatcgtcagaaaaattaaaactgaatactcgtgtcactttaattcaccaagatattctacagtttcaattccctaacaaacagaggtataaaattgttgggagtattccttaccatttaagcacacaaattattaaaaaagtggtttttgaaagccatgcgtctgacatctatctgattgttgaagaaggattctacaagggtaccttggatattcaccgaacactagggttgctcttgcacactcaagtctcgattcagcaattgcttaagctgccagcggaatgctttcatcctaaaccaaaagtaaacagtgtcttaataaaacttacccgccataccacagatgttccagataaatattggaagctatatacgtactttgtttcaaaatgggtcaatcgagaatatcgtcaactgtttactaaaaatcagtttcatcaagcaatgaaacacgccaaagtaaacaatttaagtaccgttacttatgagcaagtattgtctatttttaatagttatctattatttaacgggaggaaataattctatgagtcgcttttgtaaatttggaaagttacacgttactaaagggaatgtagataaattattaggtatactactgacagcttccaaggagctaaagaggtccctagcgcctacggggaatttgtatcgataaggggtacaaattcccactaagcgctcgggaccccttgtaggaaaatgtcctaagtgtggcaacaatattgtattaaaaaaatcgttttatggttgttcaaattatcctgaatgtaccttcactttagctgaacattttagaaagaaaaaactcaccaaaacaaatgtaaaagaattactagagggaaaagaaaccctggtaaaaggaatcaaaacgaaagatagaaagtcctacaatgccgttgtaaaaatcggagaaaagggatatattgattttatctatgtatgagaacgtattttttgaaatgcttgagcgaatcattcaattagaaaacgaaaaagaatagaatcacaaatcacaagtgattaatcacaaatcacttgtgatttgtgattgttgatgataaaataagagtaagaagaaatagaaagaagtgagtggttgtgggaaatttaggcgcacaaaaagcaaaacgaaatgatacaccaatcagtgcaaaaaaagatattatgggggataagacggttcgtgttcgtgctgacttgcaccatattataaaaatcgaaacagcaaagaatggcggaaacgtaaaagaagttatggataaagccttagaagaatatattcggaaatatttacctgacaaactttaaaaggagtgaaaatgaaatggcagttacttatgaaaaaacatttgaaatagagatcattaacgaattatcggcaagcgtttataatcgagtattaaactatgttttgaatcatgaattaaataaaaatgactctcaattattggaagtcaatttattaaaccaattaaagcttgcaaaacgtgtaaatctttttgattattctttagaagaattacaagccgttcatgagtattggcggtcaatgaatcgctattcaaaacaagttttgaataaagagaaagtggcttaatatggcaaatatagtcaattttactgacaaacaatttgaaaatcgcttaaatgataatttagaagaattggttcaaggaaaaaaagcggttgaatcgccaaccgcttttttacttggtgggcaaccagggtcagggaaaacgagtttgcgatcagcaattcttgaagaaacacaagggaatgttattgtcattgataaagaggggttaaaagctgctggtgaatggcatcaattaaaacctttgtttccttcgttagaaggaaaatctgttcttgacttggggtgcggatatggctggcactgcaagttcgcagaagaacaaggagctacaaaaatattagggatcgatttaagtaagaaaatgattgaggaagcccaaaagcgcaattcaggaaatcaaattgaatatcgtattagcggattagaggaatatgactatccagaaaatgaatgggattgtgttatatctaatttagctctgcactatatagaggacatagtggaaatatttcaaaaagtgtataggacattaaaaccaggtggaatttttctttttaatatcgaacaccctgtttttaccgcaggagttgggcaggattggatttatacagatgatgggaaaccgcaatattgggcgattgataattactttataacaggagaacgaaatacacattttttaggatgtgatgtagtaaaacaacatcacacacttacacagattataatgggattgctgaacaatgggtttgagcttaaagttgtagaggaagcagaaccgcctaaagagatgatggatattccgggtatggaagatgaacttcgccgcccgatgatgttacttgtaaaggcgatagcgaaaaaataatatctctattaggaaaactgatataccccaatttagagaatggcatagtaattcctagtgataaagagaaaatgattgcactggcaaataaatacattgaaaaagaaaatgtagatgcactcattctcgcctgtacggagctgccacttgccataaagcccgaagatgttaatgtgccaatcgtgaatacaacccaagtacatatcaatgcaatttaccaatatgcaattcgataaaaatagcaaagccagccgagccagtcaacggtcaagatgaacggcgcatttcatgcgccgccgttgacagccccgcccgtctttgctaaagggtaatcaaggcgggaaagccctaaaatggcttcacacctatttcaataattggaggagataaaaatgagatcagaaaaggaagtttatgatattgttttgaattttgcaaaaacagacaaacgcattcgcatggttactttggaaggatctagaacaaatacaaatattccgcctgatgattttcaggattttgatattactttttttgttacggatatggacagcttcacaagtgatgataaatggctagatatatttggtgaaaggttgattctgcaaaagccggaagatatggaattatttccagctgtagaaaagggattttcatatttaatgctgtttactgatgatgttaagatagatttaactttgctgccgctggaactgatagacgagtattttacatgggataaactggtaaagttactgttggataaagacaaccgtatcgtaaagccgccaataccaacggatatagactaccacttgcagaagcctactcaaagaatgtttgacgattgctgtaatgaattttggaatactacaacatatgtagtaaagggcttatgccgcaaagaaattctttttgctattgaccatatgaatgatatagtacgaaaagaattgcttcgcatgatttcctggctgattggtatcaaacagggatttcatttcagtttgggaaaaaactataaatttatgaagcaatatgtcccagaggaattgtgggaacgacttatgtccacttataatatggattcctatccccatatgtgggaatcctttgaacaatgtatggcattgttccgggaggtttcgtcagaagtggcatgccagttggattaccagtatccactatatgatgaaaaaatcagtaattatgtgattcggcaaaagaaaaaatatggcattgaagatgataacaaataaaattttttcaatcgaaaaaatttattttgattattcaattttgaaaaactgaatacctcaaaatcagaaagagcgcggacaagcactttgagggattggccgccttgtccacccatccagcggggcggcgggcggcggtcaaggccgggtgtaaccccgttcatttcagccttgacggttgcccgctgtcctgctacttttccgggagtgtggccacaacttcgggacactttgtccacaagtcggagcgtaggacgagggacgggggctttcatatacctgccgccgttctctgaaaacaggccgattttttgctcattcccattcgcaaaaattcagcctgttttcctgccggagcaaacggggtgcaagaagcaccgcaccccgtttcctctgtcagccacgccagcaggtataacacactacactttgcaagcaaagtcgtgtgccaaagggggcacccctttggaaaccctagacaacaaaacaggcggtatgctgccctctccgggagcataccgccgtttgttgtcagcagcccgtttcacggtctgcgtgtagttccttgtaaactgacctaaggtggaagctaaaacaaagttttatcatgaaggattatatttggactaatgaaagtgtgaataaatgattgggaaaaataaacctttcacctcttttctggtgaaagactgaaaggcactttgtgcgagtgtcgtttcaatgtgagccatcttagagtaaaatcaggatggctcacattgggttaaaaggatgaagagaaacttgcgtttcgtagaaaatgtggtaaaaggtatcagatgaaagatgaccgggatatgaactatgacatcaattaacaataaaacaattacgagcgtatatgaaaaaatgaaagcttacgagagaataagcaagaaactgttcattttgctattcatgctggtcttttatgggtattcatccataattgcacagccgtccatacccgctggtcaggtagatatatttgtaggggcggatttcaactaccgggatttgtttcacaatgggaaaatatatgagattttgctgaatctgactcccggtgtgaaatggaacatgggcaaggggtggcaggcggcagcacaggcattagtgccggtgtataacgactatggcgaccgatacaagaaagtacggttgaacatggcggtgttatctaaagaggcgcattggcgatcccggtggttcctgaaagcaagcggcggcttgttcggcagggagcggtatggattggacttgaaagggatgtatgtcgtaaaccgctggttggcattggaagtgcaggctggattaaccggctattgttcaatggcagtggactgggaagcaagtacccccaaacggattaccgccttgctgggcaccgatgtctatctgaacaaatggaatacgcagttccgcgcaaggggcggacgtttcctctatgaagattatggagccatagttgaagccatgcggcatttcaaccactgtacggtcggattgtacggcgagtatagcaacgagggcggcaagaatgccggttttaaggtggtgatgatgataccgccttacaagcggaaacggcgcactgtcaatttccgtccggcttctaatttccgcctgacatacagtatggaaggtgacgcctatgccaacaaaatgtacacgaccgacccggaggagaacgaacgcgagggctggtttgaccgcaatgccctgcaatggggcagcaacaccatgaagccggacttctcggaaaaggaaggagggcggaaatgagaagattattgattggcctccttgtcgtgatgggctgcattccgatattgagggcgcaagagtattcgggcgttaccggcatgatccacgtgcccacggcggaaatggcgacagagggagaagcccgtatcggtttcttcttcctgaatcaggaatttcttcctgacacctaccagtatgaaggagagaaattcaacacgaccaaccattttctggccatcacccccttcccttggatagaaatagcgtatgtctgtaccatactgaaggggattgacaacgatggccatgtcggacataataagaaagaccggtactttcacctgaaagtgcgtccgctgaaagaaggcaaatggtggcctgcaattgccataggcacccaggatcccggcagcaaggtgaacgagtcctatgccgaaggcaaatatccggtcaacgactacttccagaattattatatagccgccagcaaacacgtcatgtacaggcggaatgaatttggttttcatttgacctaccgctattttacatcggatttcaatgccaaatggcggggcatagccgccggtatcacctatcgcccgtcctttgccagaaaccttcgggcaacgatagaatataccggtgacgatatcaacatcggcgcagactgtttgttgtggaaacacctctttttgcaggcaaccttgcagaatgggaaacatttcacaggtggcctgtgtttcaagttaaacctgttgggcaagacccaccctgattgaagacacaaacaatacggatataactactagaatacagaatttcaaaataacctaatttaatcgtttaattatttttagaaatggaaaatcttagaaatctatcaagatggggaatgttcgcattccttagtgtggctttgtgcaccagtttcgtagggtgcagtgacgatgatccggattacagcaacgtgacgccgcccacggtgtccgtatcgcacagtatcagcgggcgtgtcaccggcatggacggcaacggcctttcggctaccgtgagcatgaacggcgaatcgacacagaccggcgcagatggcacgttcacttttgacgatgtggatgccggaagttataccctgacggcttccgctccggggaaacagtccaaggaaacaaccgtcaccgttgcagaaagcggaagcggagccaatgtcgtatggaacgtgtcattgcccaatgaaggcacgaccattgaagtagccgccaacggcgatacggaggccaacgtgacttcagagaccatcgaaggcaatgacgagggcgcggtcacagtggctgtcaccgtacccgagacggcggaattgcctgcgggaagttccatcgtggttaccccgctttacacgctggatgaagccgaagccaatacccgtgccacttcccgtgctgccgaaagcgtcatgctgattggtacaagcgtggcttgcaccgatgcgaacgccacgctttcaagtcccatcgaattggcttacgatgtggatgcggaagtggcgcaatccatcacggcacagaaatacgtgaacgggcaatgggtggatgcagaatatactgtagaaggcggacaagtaatcgtgtttgccgaccagttcacttcctatacgttgctctttggagcggatgtgacttcttcctccacaagcacgccgttggcctttgaacaagacctgtgggacaacctgtatggatcgggtgacatgaccgttggttcggcctcgttcacttatcacatcggaacggaaatcacttcgtccgggaccagtcggataaccgcttacctgattgagattctggcccgcattgccggcgcaggtgtcactacggctacgggaacttaccccatcaatgtgaccttgcccgtcggtacggccttgcacgtggcaggtactcaacaagtgaccactttgaccgtctccgcattgaaccgttccgtcagtggaagacaatacggtgatgtggcagtcgtgacaacctcttacaacagaaaccataatggagggacgagtgacaattgattgttgtttctcaccttgtagacagatatattaaaaagcactgtctgcaattacctgcaagtagttataatagccgcccggaatcaggacggctatttttgtagctgtatccgaagcaggaaagaaatcgtaagttttcgggaaccacaggtacaacctttgcatgtgaaatggcgactgcaactatgaacccaaatgttgtagtcgccattgttttgttgtacctgtatgcaagtagttgcattgtctatcagactctctgtgcattttgcattgtctgcactcttgccggatgttgtaatatccgttcgttcggatgcctgcgttacgcttgcataatcccaatgactattttacaatcaaacacccgtcatggtgcggctcaatttgttttgaatcgttctaaaaaaataattattcataaactctgaaccggtcgcatggattgtggttgataatttctatttttgcccataaacgaggtagcacattctgatgagagaatgcactacggataatatgactagcaatgaaagtatccttgacacaaaagatatatgccgggaacttcctgttgctggccgccatagtcggaatggtggttatcctctttcgtgagcgtagccggatgcgggagatagatttcgaagtgcatgacctgcaatcggtacggaatgacatccatgccgcacaccttcacatcaccgagctttccctgctgggcgagagcctgatcagccaagaaaatgcagatacggcaaactatcgccagaaacggctgtccacagacagcctgctgctggccttgaagccccggtgcaggcagcatgtacgtcccgaacagatagacacgctccggcacctgcttgccgacaaggaaatgcacttgttccgtgtcgtggaagccatcgggatacaggatgctgctgacagtctgcttgtccaccatctgcccaaagtggcggaacgtgccacccgcatacgcaccgtgaggaaaagaagggacaatatactgggagcgttgggcgccaagaaaaccgtccgggttttgccttccgccggagaactgcacgcattcagtgacagcctgattgccatgcagcaggaagggacggaggatatggaaaccagtgccgacagcctgtacgcccgcaatctggcattgaacgcccggctgaaccacctcatcaagaatctggacaggcaagtgcaggaagccttctttcagcgtgagcataagataatggaagcgcaaagccgttccacgctcctgctcacctctaccttgtccaccgccatcctccttttaatcctgttccacatcgccatccaccgggaaatccgccgcaatcatggcgaaaaaaagaaacgcgaagaacttatcggcgaattgcaggcgagcaatgagaagaaccggcaattgctgcaattccgtcacaacctgatgcagactgtcagccatgaaatgcgcacggccctgacggcgataagcggcaatgcagaactcctgctccgggatgaagccctggaagaccgggtacgccacatattaaccgtgcgtgaatctgccagccgcatggcttccatgaccaccgagctgctggaatttttcaggctggagatccataaagaaaagctgcatatccgtccattccgctccgagtcaatagcaactgtgttggaaacggagttcgcccctttggctgaagccaaaggaatcgaattcgtgactgacaaccagacgacagaagtgctgggaggcgataaggagcgcatattgcgcatcggaagcaacctgctctccaatgcggtcaagtttacccgcagcggtcgcattacactctgcacggactataaggacggcaacttcatcctgtacgtgcaggataccgggacgggcatcccggaagaaaagcaggaacagattttcgcccccttcgaacgtctgggcaatgctgtgactcaggacggcttcgggctgggccttgccattgtgaccaatctcgtacagctgatgcagggttctgcttccgtacagagcaaacctggcataggaagccgcttcaccgttgtcctgccgctgccgaaagccgaagaagtaccggaagaagagaagtcaatggatgtccgtccttcactggccggatgttccgtgctggccatagacaacgacccggtgacgctccgcctgatgcgcgagatgtaccttcaatgtggcgtttcatgcgacaactgccttacgttggccgagctgaccgacaggatacggagcaaggattatgacctgttgataacagacttgagaatgccggaagcgaacggctacgagattctggaactgctgcgcatgtccgacatcggcaattcccgtgaacttcccatcgtggcagctactgcggccggctatgtatcggaggaggaactgaaagaagccggattttccggattgcttcccaagccgttttccatagacgaactgatggaggcgacacggcactgcatccgtgaaagagggaaccggcagccggacttctccgccctgttggctttcggcgacaagcggaaaacattggagcagctgattgccgaaacggagaaagagatagaggaagtccggaaggcatccgaaaggaaagacttgacagccttgaacagcagggtacaccatttgaggagctcatggatggtgatacggacggaacgccccttgcagaagttgcacgaagccatccacaaggaaccgtactcggacgaagaagtcgcctatgcagcccgtgccgtgttggaacaaggagaaaccatcatagaagccgccagaaaggagatgaagaaatgggaaagataatcgtagtggaagacaaccttgtgtacagcaggtatgtctgcaattttttggaagaaaacggataccggacagtcagtacctccgattgcaccggtgcccggaaactgttttcaatgctggaagatgacgacatcgtgcttgccgacctccggttgcctgacggtgacggcatcctgttgcttgaagaactgcgccgcgaggggaagcacaatccctacgtcatcatgacggattatgcggaagtgcctaccgccgtgcgttccatgaaatccggagcggaagactatatccccaagaaactgctgaccagccagcttcccgccatgctccaagacttgcagaaaaggcagtcattccatgaggaacccctgttcataagggagagcgaagcctaccagaaagtattcggacgtctccacgtcctagccaaagccgacatctgcgtgatggttcggggtgagaacggtacaggaaagaaacatatcgctgaaaagatacatgcccaaagcgaccgtgcggacaaaccgttcgtgacagtggactgcgggctgttatccgaaagtctggccgcttccgccttgtttgggcatgaaaaaggggcttttaccggggcggtcgggcgcaaggaaggctattggtcggaagccgagggaggaacgttgttcctggatgagataggcaaccttcccctcggcgtacagcagatgctgctctgcgccatacaggacaggcgttaccgtcctgtcggcggcacaaaagacaggaaagccaacgtgcgcatcatcaccgcaacgaacgagaatctggaagaagccatatcggaaaggcgtttccgccgggacctgtatttccgattgagtgagtacaccgtgaaagtacccccgctcagggaatgcccggaagacatcctgccgcttgctgaattcttccgggaactttacaaccaagagcatggcagacaggtaaaaggtttcgatgcggaggcgaagaaacggttgctggcccatgactggccgggaaacgtacgggaactgaaacaggcggtccaatccgccgtgctttttgcccaaggggaattggtgacggcggaagaattgaacttggatgagtccggaaagccttccgatcctgacattgccttgaaaggggaatgcatggaaaagaagcggatatgccaggctttggaaaaggccgggcataatcggaaagaggccgccagactgctgggcataagccggagcacgctgtacgagaaaatggacctgtatgggattcagacgaagaggtgacatggcaggggaaaggacgaaacggaatggaaaaaagcggaaagaaagggcggtactgtgtacgaaaaacggacacctgtccggaagtcggacacgggaaggaggctgcctattcttccttaaaacaaattttcgtctgccaagagcttgatttgcaagaaattgcatacaagttcatcaccataacattgtaattggactatcatttgctcctatggatgtatgtgcgcacatttcatccgagtaaaaacaaaaaattaggaacaaatggaacatctcaccttgacggaaaccgagtttttccgtctgataagcaatcccgacagccgcaccgggttacgcacggcctacgatgagtttacacaaagggtcatccaactctgtctcatcccgcccgaaagcggacatccggtacacgccctgagctatgcggaaacggagctgcaataccatgaggccctgcaaggcaggagccatgagagcgaactgaatctgcatgtacacaaggcccttgcctttgtgcgcaagatgctacggttccttgcccgggaataccatccgttgccgccctcccacatgtttaccggcgagaaaaccggcgcccctccttctgatgcccctccgatatgttggacaggcagcatatccgacctagtggaattattgtacgggctcgacaccctgaaatgtatcaacggcggagaaaccggtatccaggaactgatggtccatttctcccgattcttcggcatggagttgaagcccagtcagtgctacaacgcctatgtggatatccgtcgtcggaaaaatgacagccgtacctatttcttcgaccgggcttccgaaaagctgaacgagcgaatcgtgaaagacgatgagcgggaacgggcacgcaagagatgaaagtttttctgtctgattcatgaccgggaacaaggtgtatgggtagaagccccttgctcccggtttctttttcctgttctagcaatgacaatttgcaagaaaatgctccaaaatttcgtatctgtcggtcaaatgattatttttgccctccaaacgtaagtattcgataaactccctcgtagtggataacgtatgttcataatatcgtttattcattttatcgttctatgatttattgttacaccaattcagcccaaagatgtgcgggttttatataagttgatattttccctactaatggagcggataaaaggaagttttcccccttttcccttattttcctgtaataaatgggataaagcggtatttttatccctgctttcccgtcataattagtataaaagggtattctttcccttattttccctatttatcggggataatgaagataaaaacggcactttattccctattttcccgtcttgattggtataaaacggtagttttcccgtgtttaggcgggatttatgaaggtatcaggagtctttcttgggagattccggtggcgtaacggataatatcttgccaccggataacagattgtcaggtaataattcggccagatccatcgagtagtcatcgtcataatcatgtacatgttcaaggaagtagatcagccacgtgcggaagtcagccccggcagccttgcagcagccgaagaacgagtagagcaccgctgcatcttcagcggcatcattattgccacagaacaggtaattacgtctgccgcacgcgacaggccgcactttattttctatctcgttattatccggtctgtagcgaccgtcaagatggtatctggagagtttgtcgaaccttccgtatgtatattttatggcttttccgataggactgcctttcatcactttgggatattcattgaccagccatttctcgaagcgcacaagtatgggatatgcaagacgtgtcctaagttcagccctctgttcgtaagtcaggcgttcatcgtcagccttgcgctccacgtcataaagcagctgtatctgttcgagcgcatagtcggcacgctgcgtgtcattctttcttgcctcccaaaaatatctgcgcgcatgggcccagcagccaagaaggataatgcctttcttggcgtccagcatctcgtacctttcgtacccgtccgtctgtatggctccccggaacttgccgaagagtttcagcaccacctttccacttcgggaacccttgtcatagtaaaagaactgacgtccggtcatgacgctgcgcacaagccagatataacctttgaccgtcttgtgtctctcgtcattcatcacggggattgtcgtctcatccgactgtatgtagtcagtctgcatcaccagatcccataatcggaagtacaggggtcttagcagatccgccacatccttgaaccagtcgttgaccgttgacgcggggaggtgtacccccacacgcttgaactgttccagttgtctgtggaacggtatgtgatccacatatttccctatcatcatgtctgccagcaatgaggcggaggcatagctctttgctatcggcatgacgggaagcgggccggtcctgaactcgtccgtccccttccgtttggctgtatggcgcactatcctgcggatatagaacttcccgggctcgtgcataaggatctcggtcacttcctctccgggaaggagcgtccactcttccggattatacccttcgggatatatatgaacctcctcacgcgcaagattttccggaagggattttctcgtaggatgttgcctcctcgcttttttacgggcgatgatcgcttctctggtagccttcagctccttttccgcttcctctgcggcttcagcctcccggggaagcatgtcgaagccttcaaaatccagccagcggtcctgggcgtcaggctttatgaacttttccgccttcttcccgtacaactgccgttcaagataggatacacgttgttccagactgttgatttttgcttccttttgggcgattatggcatccttgtcagacaataaagcctcatacgcctctttgtccgcagcttcaaggggctgcgtggacaccatctccttcaatcggctgttttctctatacagacagtcgcatttgtgcatgagatcctttatcagtaattccttatcggttggcataatcgtttaattatgatgccaagatactaaaaaacagccggaatgcggcattgtatatgttatagtttgttacaactacaacccatgaaaaccacttcttttataacgcctgaccttgctgccgtccattccctggaccatcatcacaaggtcattccagaaggtttcaatcgctttaacccgaccttcctccgtatttatgaccggcagatggaagtgcccctgttccagcctcatatggtatatcaccagaccaccatattccatatggaggattttcatacaggtacaattcgcattgataaaaatgaaagcgtcaccgtcccgtacattctttcccatctggttggtcacgatgccgctaagcgtataaaaactcttacgcatgtctgtcggatacgggtaaagataatatctgttggattcattcaaagaaaacataggctaacggtttgaattcaaaaatatcaaggtttgcaatacctccggtgacaaagggctgttcaagcggactatgacgccgttgggataggagatctcacatagtggctggggatttggcgacgggctgaccggaggtgcagactgcagggatttctccttatggggaagactgacctctcccttactgtttacctttaccgggataaagccgcctttgcgcaacagcttggaacgccacgcgtagaaacgtttggggcgaatacattcattcgaacaaaaatctataactgaaagtccgctcgacttgaaacgggcataaatagattcaaaatcttccatggtccattgatgtgacataatgattgagcttttttactttggctacaaaagtaacatcacatttttagaatgaaagggggagtttatcgaatacttacctccaaacgattacgcatgaatataaccaatatagacgacatacgcaaactggcctccggcgatgaagggggacggacagaatacaagctgatcaccgggcagttggagcgcggcatggagacactgtgcgccttcctcaacggcgagggcggtacggtactgttcggcgtggctgacaacgggaaaatcaccggtcaggaagtgagcgacaagacgaaacgggaaattgcggaagccatccgcctattcgagccgtttgccacgataacggtctcatacgcaaacattcccgacacggacaaacaggtcattgccttatatgctgaggaacaacgctatatgcgtccgttcacatataaaggcagggcttaccagcggatagaaagcgtgacgtctgtcatgccgcaggacaagtacaaccacctgctgatgcaaaggggcggcaaatacagttgggaggcaatccccaaccccgacctgcaaatcagcgacctcgacgagaatgtcatcatcggtgcggtacgcgccggaatcaactgcggacgcctgccggaaaccaccattcgcgaagaaatacccgccatccttgaaaaattcgacctgttgcatgacgggaagctgaacaatgccgccgccgtactgttcgggcgcaatctgtacgactatccccaatgcctgttgcgaatggcaaggttcagaggcacaagcaaagaggaattcatagacaaccaaagacagcaagggaacatctacgcgctattggacgctgccatgtcgttttttttcaagcacctgtccttgtcgggtaaaatagaggggctgtaccgtgaagaaaagctgagcataccttacaaggcattgagggaatgttgcatcaacgccttttgtcacagagcctaccaccgtccgggcggttcggtgggcatcgccatttatgacgaccgcgtggaaatagagagcagcggcgcgttccctcccgacatgacccttgaaaaactgcttggcggacacagttcagagccgcccaacctcatcatagccaacgtgctttacaaaagcgagttgctggaaagctggggtcgcggcatcagcctgatgatagacgagtgccgccgtgccggcatacccgacccggaattccacacggacgggagttccgtatgggtggtattccgctatgagatggaaacggctggacaagcatccgacaagcatccgacaagtacccgacaagcacccgacaagtacccgacaagcatcgtccggctcattgaactgataggggaacacacttgctcgctgaaagaaatgatgggaatgatggaactgaaggacagggagaatttcttgggcaattaccttaacccgtctatggaagccggattggtggaaccgctctatcctgaccagccgaaacatcccaagcagaaatacaggctcaccgaacaaggaaaggctttgctggaaaggggtgagtaacatggtgaagaagaaaaggaaacacggcggacactactgcaaggtatgcggctgccacaagtccaacgagagcttctcgggcagaggacacgcgctgcacatctgcaaggaatgccagtcgcttccaaaggacgaacaggcggacatgatgcgctgcaacgaggtggaacgcgccgcgttccgcttccccatgaggcggcaggactgggaactgctggaaaaatatgccaagaagtacaaggacagggagtcgggaaaattcgcgcaggagatgctggacatgaaacggggcgtttttgtgccggaagaggacgatgaagaagcggatgaatggaacaacgacatttttcaggtagcggaaaccccgttttcggaattggaggaagacacccgtaccgccatggaggaactactggaggacaacatcaacgagtacatgatacacaaggactatatccccgaagggaaggacttgcaggacatagccgattgggtgttgaaggaaaccaatgacacgttttacttgaaagccgttcccgatgacgcctaccgcaggctggtggatgataccgtccggaagatggtcaaggagtggaaagacgacggcttggagataaagacctacgccgagtcgctcacgatcatggaaacggaacggctcgtcatccgcaaaatcacccgcaaggacacgggcgcgttgctcgccctcatgggcaagtcggaagtcatgtacgcatgggaacacggctttgacaagaaggaggtgcgccaatgggtgaaccgccagttctcccgttaccgcaaggacggctacgggtatttcgcccttgtgttgaaagacgggggcaaacttatcggacaggccgggctgatgaaaagcgtgataaacgggaatgaagcggtggaactcggctacatcctggacaatgcgtattggcacaacggctatgccacggaagccgcccgaagatgcctgcggtacgctttcgagaaactgggcttgcaagaggtctattgcagcatccgtcccgaaaacacgtcctccatccgtgtggcggaagccattgccatgaaaccttgcggcagccataccattatatacaatggaaaagaaatgccccatctgctgtataaaacggagaaaccaatgcagtaattttcatttcaattgtcaatcaacgagaaaaggacaatccttaacccggtctgaacatccagccaagttaaggattttccttttttcgcctatggcgtttttacttgccctgcaagaggtgttgcagttccgggtcggactggatgcgctgcaactcgtcggcgacaatctgccgcacttccgccttgatgcggttgtagttctcctgtatcatttccttcatgcggtcgttgccgtcggcatcggtgaagtccgtgatgacggggatgggcttgtaagcctgttcctcgcgcttcaccttctccacgtccaccacaatctcgcaatgaaagattttctgctcgatgcgctcgttgaagttgtcggccaccgcgcccacgaacatgccctgcgtcagcgtggaaatcttgctcgcgggtatcaggctctccatctgcgtgttgatggaggtggacttgtcctcccggttgatggtgacgctctgccgcttctgcaagattttgccgaaacgctcggaaagcgttttggcggtctcaccaacgacttgacccgaaaagatgtttcccaccgtgttcatcacgaccgccgcttctttgtccccataatcgcgtttcaactgcgaaaagtcctgaaagccgaggcagaccgccaccttgttgcttcgggcagtggcgataagattatccaatcccttgaagtaaatcgtaggcagctcgtcgatgattaccgccgacttcagcttgcccttcttgttaatgagcttgacaattcgggaattgtacagacccaacgccgcgccgtagatgttctgacggtcgggattattgccgacgcagagaatcttaggctcatccgggttgttaatatccaacgtaaactcactgtctgacatgacccaataaagctgtggggaaatcatgcgcgagagcggtatcttcgctgatgcgatttgccccatcaactgctcggctgcacctccctgccaagcgtccataaagggcgaaagatagttttccaactccggatagctggtgagaatagggaaaacatcctcataacgtctgttcagcaactcaatggcgtgtgggaaggtgcaatactttccatcctgataaatccgtaaaaaccagataatactggcaaaaagtataatcggactctccacgaagaagtcgccttgcttttgcacccaagttttgttcaaatttaataaaatggtataggcactttcgtaggcatcggtgatgtcctccatgaaatccgggtgaatgggattgcagcggtggctccggcgcgggtcgtcgaagttaatgacgtagaacttcggcttgaccttgtagccgtcgccgtggttcatcaggtggttgtaagcgatggtggaaaggtcgctgaacttgaagtcatagatgtacatcgagtaagatttttcaatcatctgcttgataaagctgtttaccacggcatacgactttccgctgcccggagtgcccaatacgatggaagcgcggaacgggtttaccacgttgatgtacccgtcgttccacttcttcctgtaatagaagcgcgtaggcaggttcaccgaatactcgttctccatgaggcgcgtctcctgcatgaagctctcgttttccacgttgaacacgtcatccatgaggttggtgcgcaagaggcggctcatccacgtgccggacatcaggaggcagacatagcccgccgccatcgaagcggcatagaaggctacgttggcttccacgggcagcggcagggagagcatccaccagttcaggaagaacagggccagccctgcggcaagcaccgtccaaatcctgccccacgtgattttttcctccttcacgccctttgtacccaagcaagagagagccaatagcaacagcgcaaaaagttttgtgtaaaggatatggtggaacagtccggcggtgcggtcgaaattgaccagcacccggtccacgacaccgatgtcgatgccccacagccttacggcttcatacccgtaccaatagaggtggacgaccaccagaataatgctcacggcgcggagaaagtccatgattttcgccaacgccctcaaatcgtcttcctgttgtgacataaatctgtttctgtttttaagttgaacaatatgtccgcaaggctttccccggacataagcatacctcaagtccgacctgagcctatctcaagtccgaggtgaggctaccaaaggtctgaccttagatagccaaaggtctgacctttgcttggatgccctgcggacggataatttataatcccaaacccttccggcgtttcttccgcttgcgtttgagttcgcgctcgaaggcggcttcttccgcctgtgcgcccgatgcgtcgccgccaagcaagcccaagcccgtggaatggctctcgccgtgttccacataggtatgggcttccgcctgcggttcgtcccgtgtaagggtgaacggcatcggcggcgtgtccgcatacggcaaagtgaagtgctcctgcaaggcgttggcggaaaattccctgcccagccgggagccgttcagcacacagcccgtgcggtggtcgatgaaggtcgccccgtagatgcgccccccgtccgtgtggcggaacaccacatccacgcccttcgctttgagcagggcgacaaattcatccttgcggtacgtcctgtccaatacggcagcgacggtcttgcgcgtcatgtccgccagacgcttgtcgcggatttgggcattgggatactcaaacctgcgcagcacggcttcatagccgacggacttcccgatgcaggatgccttgaagggattgccgaccttgttcccgccatcatcggtggcggaatagaccagtccgtgatactcgcgtccgttcaccatgccacgggcttcctccacagtgacgttgtagagggagagcaaggcgcggtattcgcccattgtccggaacttgtaggtagccatcaccgccttgacggtgttcgacacctgacgcttcacgtctccctgcgaggcatccaccttgcgcaaggaattgtcgttacggtgctgcctgcggtcggcggggtgcagaccgtacttgcgttccagctccgtggtgatgcgcttgctgcggcgatggatgaaatccttgttcaaccgcctgccattctcgtccacattgacggagacgatatgcaggtggtggcggttgatgtcctcatgtttgaaaattagataaggctggtcgccgtagcccagcttctccagatactcccgcgcgagactttccatctccatgtccgtcaggcggtcgtcgggatgcggattaagggagatatggatgaccttgttccgtgtgcggacgttctccggcatgtaccgtttgaaatcctgttcggcacgggcgatgtccacccgtccgctgccatcgtcgaagaccttgttcccggcgagcagcttcccctcgccctcgttcactttcatgccgttgtaagccaacgccccgtacagcgacgtgcctaccgtgatttttgcgaccatctttcctgaaactcccttgaaagttcaacgacctgccgcgtgattgcggccagttccttcgtgcattgctccagcttgtagagcaatgccatcgcctttttctccgagaaatggcagcgcagctccttgaccgtctggttatagttgttccccaccatgcggtactgcgcatggaaagcggacagcttcgtgcagtagtcgagcagcgtcttgtccgtgaccagtacccggaacggctgtccgaagaagtgcgccttcaggaacaccgccctcgcctccacgccggacttgccgtgcatagcgaggaacctgagccattccccgtcgtcgaaacgcaccatcacgcagtgcgacttgcggctttcccgtggatgccgcccccacttgggactgtcagtcccgttctttttcttgttctcgttcatattacaatggatttagtggtgtcacggcataagcgtagcttcggcaaccgcaccgcaggtggaaacaggcttcccgacttcggagaggaagccctccccgtgaggggcaaggtcgtttcgggagtaacccgaaaccctttgagttactcaaaggacaccttgctgtgtctttgaggacacaaaaatccgtggtaaacggattggggatagacctgccattacccatttataaggcatcggtcgcccgatacctttctgctgcccaaaagaaggacggagccggggtctgcggtgcgcgctttcggctttgccctgccgcttgggtgcaaaggtagggtgttttccaagtctgaaatacggctcaaaaacgccacaagctgccacgacagcgccaaatgctgccacgcaagtgaaaaaaacatagttgcctgcctgtccgttttcagatttgcgaaccggaaggcattcttgcccgcctgccagttcacctgcctgcctgtcagtctgcttgcccttgtgcctgcctgccggcacgctggcatacaggcattggagcggggaaatgccaaagagcataaaccagccaaacaaagaaactgttggaaagcgatggaggaatgtgctaagatgtccacgagactacatttagcacaagtgaaaaagagttcttcatgtttgtagtcaatatgtttgcgaatccgcaagcattcttgcccgccagcctgctcacctgcctgccagtctgcttgcccttgtgcctgcctgccggcatacaggcattggagtgctgaaatgccaaagagcgaaaatcagccaagcaagaaaactattggaaagcgattggtaggaatgaattaagatgttcatgagtccacattggccacaatagaaaaagttctacctatttgtggccaatatgcctgcgaacctacaagctagcattcttccttgccaggtggcaggcattcttgcccgcctgccagttcacctgcctgccagtctgcttgcccttgtgcctgcctgccggcacgctggcatacaggcatcggaatggtgaaaatgccaaataacggccacaagccaaacgcaagatgagtggcgataaggccgggtaaagaacgccacaagctgccacgacaacgccaaatgctgccacgcaacggcaaaaggatacaacctttgagaaagcccctttcctttgcaggcgaaacggtcggcacgcctgcctgcttccgggctgacatccttgccaacctgcctgccagtccgccagcccttgtgcctgccggcacacaggcatacaggcaaaggcttggtggaaaggcaaagggcggatgccgtttcaatgggccaaacgccaggaaaagcggtggaaagggtggccaaagaacgccacaagctgccacgacaacgccaaatgctgccacgcaacagcaaagagacacaaccttggcgaaagtcattttcctttgcaggcggaatggtcggtatgcctgcccttatgcttgcctgccggcacacaggcatggatgggaacaggcataccgggagggatgccggactgcctgctcgcttaccgggcggatggctgccgaccggaccaagaaacggatgtctaacaaataaaaaagaagaaagcatgaaaaaagaacctttgttcatcgccttctccacccagaagggaggagcaggcaaaacgacactcaccgtactgatggcgagttacctgtattacgtgaagggatatgacgtggcggtcgtggactgcgactatccccagttcagcatcaaggacatgcgcgaacgcgacttgaaaagtatcgagcgcaacccgtacctgcgcaagctggcatacgagcagttcaagcgcatcggcaaacgcgcctacccgattgtggggagccgtcccggcaacgcgattgaaacggtcaggccatttgtcgagtcggcgacaccgcccgacttcatcttcttcgacctgacgggtacggtgaacaacctcgacctgatccggacagtagcgacgatggactacatcttctgcccgatagccgcagaccgtttcatcatggaaagctcgctgaagtacgcgggcgtcatcaacgacacgctgatcactaccggcaagtcgaacatcaagggcatccgcctcttgtggaacatggtggacaagcgcgagaagaccgacctgtacgacatctatgacaaggtgatagccgggatggggcttgaagtgctggacaccagtctgcccgacagcaagcgtttccgcaaggaaggctctgaggaaggcgaccgcccgtttttccgctccacgctgctgccgccggacaaggcattggcgaaagggagcggcatcgatgccctcgcggaagaaatactcggcatcgtaaagcgttgaaccgatggccaagaaactcgatgtcgatattgaccccggcaagttcctggattcgttccgtccggaaatgcccgcgcccgcctccccggggagcctcggaacagatggcaacacttccgcaaaggaggccaggctggcggaaaaaccgaaagcaaaggtgggcaaggatgccacggaaaaggaagaggaatacctggaacgcttcctccatgcaccgagaatccccgtgtgttcgggcaagaccgcctacatccgcaaaagctaccacgagcggatacagcgtatcgtgcaggtcatcgggaagaacgggcttacgttgtcggtctatgtggaccgtgtgctggagcagcacttccgcgaatacgaggaagtgatccgccgactttacaagaaaaattacgaggacatttattgattttattcaccctaaaaaacgaaaacaagatgggatttttcaattcgagaatgaaaaagaaggggaatggcaacccgaaggcggacactccccaagtgaacaatctggaaaaggcggacgtagtcatccacattgtggacgacacccaattagaaaaagcggcggtgttcctccgctatctgacgcccagacaaggagcgcaccgccagtgcatttacctcagccgtgagatgcacgggaagctgtcccgcattgtgcggacactgggcgggaacggcagcaccattggcgggtacatcgagaatgtgctggaagagcacttgcaaacctatggggacgacatcaatgccctgttacgccgtgaaacctcgcaaccgctctgacgatggccgagctgctcatcgtgctgatgatggccttcaacctatggatggtcatctacctgacttgggaacgccgggaagaaaacgtacccaaggaggacaaggaaaaggatgtgggcgcaccggaaaggtccggcgacatcatggggaaaagcctgttccggatgcctgaacgaaaaccgcaggctgctgcaccgatgtccaatgccaccgtgcaagcccccggcgaggaggtggacgagaaggacgtggcctttgacgatgaaactgcctcccccaatagccggctttcgggagccaggccgtcgcgccaagtgcccgacgaggaactggacgaggtgtttgccgacaagcgtgtttccgacatcggggcggaatatgacgaagacggagatgatgacggcgagcctcatgaagcgggaggcatgaccttcgaggacatcgaccttgccatgcggacggtgaagaaaccgaaagccacgaaagaggaacgccgtcacgccggaatggtgttctgcgacatgaagggcaacgaactgttcgcgatgatagaaaagagttcggaagcgacccgcaggaaactggacgagctgatggactactatctggactccgtgtcggcggcgcaggcaaacactacaccggtgattatgcccaagaaagcgcccgcagttccggacaacttcgaggacttcaacatccgcgactatgtataacaagtaaaaacgtaacagcaatgcgaaaaaagaaaatcgactacggctaaaccatcggcttgccaccgagaccactaaatcccaaaagccggcttcatccaaagccgcaagaattaaaacaagtatcaaccgccaatgggaacatccaacccggaggcacaaaacagaaaagattatgacaaagacattgaagaaaaagcaaatcatcctcgcggccctcctgctggctgccaacatccaagttttcgcgcaaggcaacggcatggcgggcatcaccgaagccaccagcatggtcacttcctactttgacccggcgacgaaactcatctacgccatcggcgcggtcgtcgggcttatcggaggcatcaaggtgtacggcaaattcagcgccggcgaccccgacacctcgaagaccgccgcaagctggttcggcgcgtgtatcttcctgattgtaagcgcgaccatcctgcgctcgttcttcctctaacaaacgggtatcctatacatatataataaggtataaggacaatggctgagtaccccatcaacaagggcatcggccgtccggtggagttcaagggcctgaaggcgcagtacctgttcctgttcgcgggcgggctgctcgccgccttcatcctcttcatcatcctctacatggcaggcgcgggccagtggctctgcatcggcttcggcgcggtatccgcctcgtcgctcgtgtggctcacgttctggctgaacgcgaagtacggcgaacacgggctgatgaagttgggcgcggcacggatgcgcccacgccatgtgctccaccgcagacgggtgtccaatctgttaagacgaaaaaagaagaaaggaagaaacgtatgagaaacatcatgaaagccaccacgctggaaagccgcttccccctgctttcggtggaacacgggtgcatcgtctcgaaagacgcggacatcaccgccgccttcgaggtggagcttccggaggtctataccgtcacggcggaggaatacgagggcatccacgccacgtggtgcaaggcaatcaaggtactgcccgaccattcggtgctgcacaagcaagactggtacgtgaaggaacggtaccgccccgacctcggcaaggagggcatgggcttcctcgcccgcagctacgagatgcacttcaacgagcgcccgttcctgcaccacaagtgctacctgttcctgacgaagactacgaaggagcgcatgaggcagcagagcaactggaatacgctgtgccgggggcatatcgtaccgaaagaaatacaggacaaggagacggcggtgaagttcatcgaggcggtggagcagttcgcgcgtatcctgaacgattcggggcatatcaaattgcgccgcctctccgatgacgagcttacaggcacggacaaggagacgggcatcataggcaggtacttcgccctgtcgctgggcaacgcggactgtctggaggacatcgagatgacggcaagggaaatgcgcgtcggcgacaaccgcctgtgcctgcacaccctgtcggacacggaggacctgcccgcagcggtggccacggactgccgttacgaaaggctgtccaccgaccgctcggactgccgcctgtccttcgccgcgccgctgggactgctgctgccctgcaaccacatctacaaccagtatgtcttcatcggcaacagcgacgaggaactgcgccgcttcgagaaaacggcgaggaacatgcagtcgctctcccggtacagccgccagaacgccatcaaccgcgagtgggtgcgatacgtcgctgtgtaagtaattgttaaacttagatttaacccgttgtttcgtcaacggtagcctatggacagatgcaccaatagtaatatactgtatcaaagctgtccagacaaggtagcccttccgaaaggagcagtcagaaccgtgagggaaagacaatggctgttagtatcatacagtcagggagcttggcttgggtggtatggttagcgtaagcgaactgtcgtctaaacgtcgtaaggttgaagaagccaaagatactgataggcttcagcccaaaagggaagcagtcggttattcctctccattctgggaatacacgaacagagtactgccggtgtaatagacagaacctaacccacttataagttacttgcacggaacgtagtaagcccgtatttctcctgccaatgacaggtaagcagaccgtaaggaatgccgaatggagtgcgggtataggattgcagaaaaagcgaatgccaccctgtaatggggtgaatagggattgaaacatcatcccgctgcgaaagcaggctgacttctgcggtaggtgattctttacaagaaacttttagaacttttaaaaggagaaaagcaaatgaacgaaattaaaaaatcgtgtgcatcgactgaccaaacgcagagcaaatgggacagtataaattggctcaaatgcgaagctgcggttcaaaagctacaagcgcgtattgtaaaggctcaaaaagagggtcgccacaacaaggtcaaagccttgcagtggacactgacccactcgttttacgctaaagcattagcggtaagacgtgtaacttccaataatgggagtaaaacggctggcgtcgatatggtaacatggaaaacgccagatgctaaagtgtgtgcaataaccgaactgaaaaggagaggttatacaccccaacctctgagacgagtacatatcagaaagagtaacgggaaattaagaccattgggtataccaactatgaaagaccgggctatgcaggcattgtatctgatggcactggctcccgtagctgaaacaacggctgatgccaattcttatggtttcagaaaagaaaggagcacggcagatgccgttcaacaatgcttcaatgacctggcaaggacgacatccccacaatggatcttagaaggtgatatcaaaggttgtttcgaccatatcagtcatgaatggttgcttgacaatatccctatggataaagttttgctccgtaaatggttgaaaagtggatttattttcaacaagcaactttttccgacagaggagggaactcctcaaggcggcatcatctccccaactcttgcaaatatgactttggacggactggaaaaactgcttgccgatagctttccgataaaccgctcgaagaaaaattactatactcctatgataaatcttgttcgctacgcggatgattttattatcacaggagagagtaaggagttgttggagaaccatgttaaaccattagtcattgagtttcttcaagcaagagggcttaccttatcagaagaaaagactaagataactcatatagaagaagggtttgattttcttgggttcaatatcagaaaatataaaggcaagtttatcacaaaaccatccaagaagagtcgaaagagatttttagataaggttcgtgaaatagtggacaagaacaagtcttctaagcaacaatctttgatacgattgctaaacccagtcattagaggatgggcgaactactacaaggggtgttctgcatcggaaactttccgtaaaacagatgcacaaattttcaacaaactatggcgatggtctcgcagaagacatcccaaaaaaggtaaacgatggattgccaacaagtattatcacactgtaagaggtagaagctggacttttgccgtaccgcttgaaaacaggaaagtggataaataccacactcttgtgagattgtcggatacgaaaataaagcgacatatcaaaatccgcagtgaggccaacccatatgatgccgattggaaagatttcttcgatcaatacaagacccgaagaatgcttgcacacttagacggcaagcaatatatctatcgcctgtggaatcagcaaatgcaatgttgccctgtgtgtggcaagcacatcacacgggaaactccctggaaaattactgaaatgacagggagcagtagaaaggcgaaagtcctaatacatgatcattgcagccgaattactaacagaaataaatggaagttactatgagccggcttttagttacaaataaaagttttgaattgcttgagccgtatgaggggaaactctcacgtacggttcttagaggggaaagctcccgtaagggggctgacctactcgacattgaagaatacctgaacgaagcgcactcgcaggggctgaagtccgtccgcgcccacttcaacgtgatggcgtggagcgacgacgcggaggagctgaaacgcatcaagaacgacgtgggcagccagatggcaagcatgggctgtgtgccgcgccacaacacgacggactgcccgacgctgttctgggcgggcatccccggcaacgcggcggacttcccggcggaagagtcgttccacacgttcatagagcaggcggtgtgcctcttcgcgggcgagaccaactacaaggactctccgtccgccttcggcatccgcatggcggaccgcatcagcggcaagcccctgcacatcgacatctccgacctgccgatgaagcgcggcgtgacgaccaaccgcaacaagttcgtattgggtccttcgggcagcggcaaatcgttcttcatgaaccatctggtcagacaatactatgagcaaggctcccatgtggtgctggtcgatacgggcaactcctaccaagggctgtgcgagatgatacaccgcaagaccaagggaaaggacggggtttattatacctatacggaggacaacccgatttcctttaatccgttctacacggaggacaaggtgtatgacatcgaaaagagggaaagtatcaagactttgttgctgacgctgtggaagaaggacaatgagcctgctacccgtgcggaggaggttgcactttccaatgccgtgtcgcagtacataggacgtattaaggaagacaacagcattgtcccatgcttcaacacgttctacgagtttatagacacggattatcgcaaggtattggaagataagaaagtgcgtgaaaaggactttgacattgccagtttcctgaatgtgctggagccgtactacaagggcggtgaatataattacctgcttaattcggacaaggaactggacttgctacacaagcggttcatcgtctttgaaatcgaccagataaaagagcacgccatcttgttcccggttacgacaatcatcattatggagttgttcatcaacaagatgcgccgtctgcaaggtatcagaaagatgataataattgaagaggcttggaaggcgattgcttcggcgaatatggcttcctatgtaaagtatctttataagacggtcagaaagtatttcggcgaggcaatagtggtgacgcaggaggtggacgacatcatcagctcgcccatcgtcaaggagtccatcatcaacaactcggactgcaagatactgctcgaccagcggaagttcatgaaccgcttcgaccagatacagggattgctggggctgacggaaaaggagaagtcgcagatactttccatcaaccagtccaacgattcgtccagacgatacaaggaggtgtggataggcttaggcggcacacagtcggcggtgtacgccacggaggtgtccatacacgaataccttgcctatacaacggaggaaacggagaagatggaagtccgcgaactggcggggaagctgggcagcgacatggaagccgccatacggcagattgcggagaaacgtatggacgaagaaaagtaaccgatggaaacatcacccgaccacagacggcgtttgaggccaccttatacggcatataagggtgtatcaaacggcgtatgaggtcaagacacattttatcaacaaaaaaacaagaattgaagattatgaacattgaactgacaaagacacaacggctgctgctttgcggcggtctgataggcttggcgtcgctgatgctgcaagcctgcgagacggtaatgaaagaaaacgaagacatccgcgagaagatttgcggcaactggcagagcgtggagggcaagcccgacatattggtgtacaaggagggcgcactttacaaggtgacgctgttccgcagggcgggcgtccaccggaaactgaagccggagacctacctgctgcaaagggaggcggacggtaacctctacctgaacacgggcttccgcatcgacgtggcatacaacgaggaaacggacatcctgtccttttcgcctaacggcgactatatccgggtgaacacggatgaaacagccaatggcgaaaagaagaaagaacaataagaatgtaccactaaatccaatgtgaatatgagacaaaaactgaaaatgccattggtggcagcctgcctgtgccttgcaggtgcaggcacggcaaacgcccaatgggtggtgtccgacccgacgaacctcgcgcagagcatcatcaactccgccaaggagatggtggaaacggcgggcacgaaagccaacacgctcaacggcttcttggaaaccaagaaagtgtttgagcagggaaagaagtattacgacgcgctgaaatccgtacatgacgtggtgaagggcggcgtgaaggtgtcgaaaagcatcgggttggtgatggaaatatcagaaatctatgtggataactaccagaagatgctctctgatgagaactacacgccggaagagcttgccgccatatcgtcgggctacaccatgctgatagacgagagttcggacgtgctgcaagacctgaagaacgtggtgaacgtgacggggatgtcgctcacggacgcggaacggctggcgattatcgacaacgcctaccgcagcctgatgaactaccgcaacctcgtgcgctactacacgaacaagaccatatcggtgtcctacctccgggcaaggaagaagaacgacatggaccgggtgataggactctacggaaaccccaacgaaaaatactggtaagttatgggagagttcgacaaccttcaccagatactcctttcgctctacgacgagatgatgccgctgtgcgcggacatgacgggcgtggcgaaagggcttgccgggctgggcgcgttgttctacgtggcggtgcgcgtgtggcagtcgctcgcccgcgccgaggcgatagacgtgtacccgctgctccgcccgtttgcgctcggtttgtgcatcctgttcttcccgaccatcgtgttgggtacgatgaacagcgtgttaagccccatcgtgcagggcgtacacggcatcctcgaagaacagaccttcgacatgaacgagtaccgggagcagaaagacaaactggaatacgaggcgatgatgcgcaacccggagaccgcctacctcgccagtgatgaggaatttgaccgccagttggacgagctgggctggtcgccctcggacttggtgacgatgacggggatgtacatggaccgggcggcgtacaacatcaagaagacggtgcgtgactggttccgggaactgctggaactgatgttcgccgcagccgcgctcatcatcgacacgctcaggacgttcttcctcgtggtgctgagcatcctgggaccggtagccttcgcctttgccgtatgggacggcttccactcgacgctctcggcgtggttcagccgctacatacagatttacctgtggcttcccgtgtcggatttgttcagcaccatactggcgaagatacagattctgatgttgcagaacgacatacaagcgatgcagaccgacccgaacttctcggtggaggcgagcaacggggtgtacatcgtgttcctcatcatcggcatcgtgggctacttcaccatcccgacggtggcaggctggatcatccaagcaggtggcggcataggcagctacaacaagaacatcaacaccgccggggctttgggcggcagcgtggcgggagccgccgcaggaaacgtggcaggccgcgcgggcaagctcatcaagggaacggcgggaaagctgttccgaagataggcattccggacaatccgtttccgtgagttgcccgacccttaaaaacggattattgaacaattaaaagacgaaaagaagaaaatggaattcaaatcactcaagaacatcgagacgagtttccggcagatacgtctgttcggcatcgtctatacggcggcctgcgccctcgtggtggtctgctcggtggtgtgcgccttccgcttcgccgaggcgcaacggcagaagatatacgtcctcgatggaggcaagagtcttatgctcgcgctctcgcaggacctgtcgcagaaccgcccggcggaagccagggaacacgtgcgccgcttccacgaactgtttttcaccctctcgccggagaaaagcgcgatagagcacaacgtgaaacgcgccctgctcttggcagacaagagcgcgtacaactattacgccgacttcgccgaaaagggcttctacaaccgcatcatcgccgggaacatcaaccaagtgttgcaggtggacagcgtggtgtgcaatttcgaccgctatccctacgaggcgcggacatacgcccgtcagatgattatccgcgagagcaacgtgacggaacggacattagtaaccgcctgccgcctgctcaacgcgagccgctcggacgacaacccaaacggcttcaccatcgagggcttcacggtattggagaacaaggacatccggacgattgaaagataatgcgtatgggaaagatgaaaaatctcattgaaaagtggaccaccgggctgaaaggttggttacgcaataggctggacgccctgccgcccaaagcacggcttaggatagtccttgcggcatttgccgtgttcgcctcgctctgtctctacatgactgccgccgcaatcatcggcttcggcaaaggggaagaggcattggagatacggcacatcgagaagttagaaatatataataaggtgtatcactcaaatttgaatccacaatgaaattatcagattggatatgggaaaagatggaaaacttgcaggatgccggattccgatggaaaccgaccttgaagttctgccatcaggtgcttcgcttggattacaatgccattgccgattccatcgtaaggaacgggcatcgcccggcaattacggaagagcaggcaaaaatactctgggattaccgtttcttccggaatctggaccagacggaacgcagcggctggcacaaggttatggatgtactgcaacaaaccgattggggcaaacagcaggtctggttgttgtccggattgaaaatggggaatgaaacacttccccaaaaactgaatgccatgtacacgctgctttgtagtgcccatacgggtaaaagccataccctatgtcctctgcccaatccggaagaagtggctaccgcccataagctggtagggtattgcatgaaggacgaggaactcgactacttgaagcggcttgccctgcatggggaatatccgggagacctgaccgccatcaggcatggtctgatggatatgtaccaaaagatagaggacctcgaatgggaacgggccaaggaaatgcgtgcggacaatcactggtcggcggactccatcgatgcggccatccaggaggaaaaaggacggattatgcgcagtgcctccgatttgtacgagcagaaagtgcagggcaagttcccggacgactatcggaaagccctgcaccgggaacggatggtgcttcatggactctctcaaaagggatgggacgggcagacaaaaattccgaaacctctgttggtcaagtatgggttggcggaatcattcggaaaaataagcgatgcgttgatggattacattatccgttgtgacatgggagacgatacttatcccaagcatatggtagggcatcataaccgcatcatcaaagaacagtcccggataggattggaacgcttggaacacaggttgtttccggataaaaacaaaccaaagctccatccggcttctttgggtacgcataaaatgcccattcgcttacagaatcaggtaagcaaagagaataaaggtataaaaatcagactttgacaagctaattgaactgatgatggaaacaaaagaacagaagaatgaatcaagaacaaaagagaaaaagccgctgacggaacaacagcgtcagcaaaggcagaagatgctggtctatccgctgatggtgctgctgttcgccgggtgtatgtggctcatcttcgcgccgtcctccgaggacaaggagaaagaacggcagggacagggattcaacacggacatgcccatgcccgaagactccaaaatcatcggggacaaggcgaaagcctacgagcagcaggatttggaaaacaagcggaaggaacgccggggcatggtgggcgacctctccgcgttctggaacgacagcgacggtgacacgccaacggacgatgccgacacttcggacgattaccgcctgacacggacggaaacgaccgacggggaaacggcggacgaaagacaggcgggcatccgcacttccgctgccgcctaccaacggctgaacacctcgctgggcacgttctacgagccgccgaaggaggacacggaaaaggaggaactccgggagcgcatcgacgaactggaagccatgctggtggcgcaggatagcaagccttccacgatggaggaacaggtcgccctgttggaaaagtcctatgagctggcggcgaagtaccagaatgacaacaatgccggacaagccgcacagcccgatgaaacgggaggttctgtgagtacaggcgaaaagagcatgaaggcagaacccgtaagcgatgtaaggcggacggtggtgtccgccctgccgcagcccatgacagactcggcgttcatcgcggactattcgggggaacgcaactacggcttccacaccgccatcggtgcggaggaaacgacggggaagaacaccatcgccgcctgtgtgcagggcgaccagacgctgacggacgggcagacggtgaagctccggctgctggagccgatgcgcgtgtcggggcgcgtcatcccccggaacacgctccttgtgggcgcggcacggttgcagggcgaaaggctcggcatcggcatcacctcgctggaacacgggggaaacatcatcccggtagaactggaggtgtacgacagcgacgggcaggcgggcatcttcatacccggctcgatggagatagacgcggcaaaggaaatcggggcgaacatgggcagctcgctcggaagcagcatcaacatatcgaccgacgcgggggcgcagctcgcctccgacttggggcgaggggcgatacagggcatctcgcagtacatctcgaaaaggatgcgcacggtcaaggtacatctgaagtcagggtacagggtattgctctaccaagaaaaggaatgaacagtccaaaaacataaaggcaaaaaaagaaaaaataatcaacaaactaatttttatttaccactaaatccaacgtaaaatgagtatcaagaaagtaatgacaatgtttgccctgctgatgggcatcgcctgtgcgagctacgcgcagggagtgacgaacgacagcactgccaccgccaaggaggacgggctggaactggtgaaggacgtctatccgcagacggaggaggacggcgacctgtaccacggtctgacgaaaaagctgatgttcgaccgcatgataccgccgcacggcttggaagtcacgtatgacaagaccgtccacatcctgtttccggcggcggtgcgctacgtggacttgggttcgcccaacctgatagcgggcaaggcggacggtgcggagaacgtcatccgtgtgaaggcgacggtcaagaatttccgcaacgagacgaacatgagcgtcatcacggaggacgggtcattttacacatttaatgtgaaatacgccgatgagccgcttatcctgaacgtggaaatgaaggactttatccacgacggcagcacggtgaaccgaccgaacaacgcgcaggaaatctacctgaaggaactgggcagcgaaagcccgatgctggtacacctcatcatgaagtcgctgcacaaggaggacaagcgcaaggtgaagcacatcggctgcaagcgtttcggcatccagtacctgctgaaagggatttatgtccacaatgacctgctgtatttctacacggagataaagaaccaaagcaatgtgccgtttgacgtggactacatcacgttcaagattgtggacaagaaggtggcgaagcgtaccgccatgcaggaacaggtgctgttcccgctccgcgcctacaactacgccgtccgtgtagccgggaagcggtccgaacgcacggtgttctgccttccgaagttcaccatccccgacggcaagcagctcgtggtggagatgaacgagaaggacggcggacgccaccagacgtttaccgtggagaacgaggacttggtacaggctgaaaccatcaacgaactgcgcgtgcgatgaaaggaaaggtactgtttattgtaacgcttctgttcgtcctcctggcaggacgggcggaagcccaacggtgcctgccgaagatgcggggcatcgagttgagagccgggctgaacgaggcggacggctatgtgctgggagccatgctttcgagctacgcgaaaggtgggaacaagtgggtgtacgggctggaatacctgaaaaccagccacggataccggagtacgaccatccctgcggcacagttcacggcggagggcggttactactacaacttcctctcggacgcgaaaaaggtggtgttcttctacgctggcgcgtcagcccttgccgggtacgagacggtgaactggggcggaaagacgctgtacgacggggcgaggctgaacaacaaggacgcctttgtctatggctgcgccgccacgctggaaatggagctgtacctcgtggacttcattgcgctgacggcctcgctgcgtgaacgcttcctgtggggcggcagcatgggcgtgtgccacacggaatacgggataggcgtgaagttcatcatcaactgaatgtgcgcctatatggatatagaagcgatgaaacgctatccgctggaggacttccttgcacggctggggcatcatcccgtgcaaagacgtgccaacgccatctggtacaggtcgccgtaccgggaggaacacacgccttccttcaaggtaaacccggaaaagaacctctggtttgattttggcgagggcaagggcggtaacatcttcgcccttgcgggggagttcatccaaagcggcgacttcctcacacaggcgaggtatgtggcggaggtggcggacatgccgttgcaggactatgagcaacgccgcacccccgaagtgcggcaaccagccggacacagcttcgaggacgtggaagtgctgcccttgcagagccgggcgttactccattacctgcaagaaaggggcataccgtccgccatagccatcgcgaactgcaaggagatgcgctactccacgcacgggaaacggtatttcgccgtggctttcggcaactgcggtggcggctacgagatacgcaacccgttcttcaagggctgtgtgccgccaaaggacgtcaccctgctgccgtcaggctctgccgtttgcaacgtgtacgagggcttcgtggactacctttccgcccgtgcattaggcatcggcggcggggaggaccaccttgtcctcaactcggtgtccaatgtggcgagggcgtaccggcatctggacggctacggaacggtgcggtgccaccttgacaacgacgaagccgggcggcggacattggaagccctgcgcacacgttacggcgaaagggtgtcggactgctccggcatctacggcggatgcaaggacttgaacgagtatctgcaaagccgtctgaaacaaaacgagaagaacaacaagaacatcaaacttaaaatgtaacggttatgaacatgaacaaattaaacaatacacggaaagtgaaaagaaacatagtaaaatcattggcaaccctttgtctggggctgctctctgtatgcttcaccgcctgcgatgacgatttggacgtgacgcaagcctatccgttcacggtggaagccatgcccgtgccgaaggaactggcgcagggcgagacggcggaaatccgttgcgaactggtacgcgagggcgagtttgacggggcggtctataccatccgctatttccaatacgacggggagggcacgttgaagctggataacggcttggtgttgcagcccaacgaccgctacctgctggagaacgaaaaattccgcctatattacacctcggagtgcgacgagtcgcaaagcctgaccatcacggtggaggacaatttcggcaatgcctgcgagtgggaattggagttcaacaacgactcggacgcggaaacggagggaggcgtcgctgtgtctgacaccttgaacgccagccgatgatgcgcaaggcgttgctcctgctgctggcggctgccctctgtggcagcctgccggcacaagacacggacagcatggcggaactgctggcatcgtttaacaatcatcccaaggctgacatcgccgttgaactgataaaaaagtacgagggactgcacgaccgttccgattacccctactacggctacgggcatcgcaggttgcccaacgaaaacctttcctatgacatgacggaggcggaagccgaagccctgctccgcaaggatttggcggtgcgctacaagctgttccgcaaatttggtaaagatgccttgcttcttaccgtattaagtttcaatgtgggtcaaggggtattgcttggtcacggcggacacccgaaaagcaaactcatccgcaagctggaagccgggaatcgagacatttaccgtgaatatatcgcttactgccggtacaaaggaaagcagcacgccatgctattcaatcgaagaaaaacagaatttgcgttgctatatattccgtgatatgattaaaattccttgcggtaaataatttcgcaaggaatttttgcttccaatacaaataaacatattatctttacaaataaattttcgaaaaatgaaagagccgaaagaaatctattatttacctgtagaacagttatctgatgatgttattcaatatattgaaaaagtttttgagttattagatgctgtaaaaaatgattgcaatagcaataatttttctcgccgatttactttcataagagatgagaaagctattagtgatgttgcggaaattaaaaaagataataataaattaaatcatatatatatcaacgaaaatttctgtcagtatttatggtctgtttgtgtctatcttatcgcatattttgaaaatgttatacatatccctatgatggatgctgttggtattaataaaaatggatataagcccaatatgatagatgtagaatatggcaatgattgttttttcagaggacggcaattattacataactttaatagagatgcatattgggttactccaaatatctgtaatccgcagcaatttgaaaatattataagccatgcgaatgatgtctattgtgctgcaatagcatttatatatgctcacgagttttcacataattatttggggcatacacaaatacagcaaacgctttctcgttcaataaatgatgaaattgcagcagatgatatggcaattagctttattcaaactgaatataactctgcatggggaagaacctataaggcaggaattgcaactacattagcagcccttttattaatgggagaggattctatttctggtggtggaacccatccagatatggatgttcgaatagaaaatttggttactaaactggaattgcacgaaatggatcttctttggggctatttaggggttgctttaagattatggcttcttgtttttgatggcttatccatcaaagaggatatgcagcaaccggggtttggttcatacaaagagatatatttatattatatagaaaaattaaagattgtcaggcaacaacgttatcctacaattatcaaaccagactgggatatataattaatgacttcattggatttttccatcttatcgaagatgggggcaacggtttctttgctactttcttatccgccgacctgctcatgaaagaaagtagcgggcggcaagcctgccgcccgattttaccgctttatcctttgcagcacacgctcaagtgtgcgctcggcaatggggcgtgtgtccttgttccaaaggttatacccgtgtacggatattcccacgctccgcaaatctcggatataaccggacgcttcatcttgcgtgggcaggtaaacgaactgcacccatgcgtccctgccgtctgtcagtatgaaatagtatttcatttcgcttgttttttcagttgttacgaatggagtgtgggcggtgtttccaccgccacgcactcaaaattcctttatgtcggcgatagccgtgcagcgtgtgagccattcctttacgcagggcatgttgtattcggaagtgatgactgccgtatgcccgtttatctgcgtaaacctcgtactttcatagtcctccacccatcctttgaggctgtccgttccccatgcgtccgcatcggcgaacatattgtccaaaaccttgatagggtcgctgaacgtcactatcagcgtttcatatcctgcgctcatcgtctgccctccttcgctttaatccattcgtcacgcaaccgcctgcactcgtccaatgtgggtttcacgcaggagaacagttctcccgttgtggtgtcccgatagtcatattggtacatcgtgcggactttgcgcccgattttcagttggaatttctcgtatttctcacctgccgtgcaggtgcttactccgttaatagtcattcttgttgtcatagccttatcaattaaaattcaacaatcagtaatctgttctccaaacattggtcggggtcggatgcctttttctgtgtcacccacagatggtgtgcgccatacccgaatgcgaaaagggcgttgaaaagtttctttcgggcgaacacctccattaccccccttacatcctgctcgtcctttgtcagtacaagcgtgttcaacaattcgatgaacatttcaggcagtttctcgtgccacccgaaaatcatgttttctattctcacttccatatcaataagtattaagttgttaaacgattacgctgcttctttcatccgtttccgtatctgctcggcattgtcctccaccaatttgatgatgcggtcgtggtattcggtgttggagttgcatacgccacggctctgcaccacttttaatgtccgcaagtccacctccactgtctcgatgcgtcgctcgtctatccgtgcggaaagtatcagggagttctcattgttgtagtaggcgttggcatagacgcaatggtgcatggctttcccctcctcgtagaactcgtccacgctttgcagcaccttgacgatgattagaccgtccgtcagtacaaggttgaggaatgcggctttctttcggatatactcgtctttctctttcgccatttcttccagacgcttccgctcacgctccaaccgctcggcttcccactccctgtgttgctgctgccgttcacgctccaattggacttgccgtttccccatatacaggtcgtgagccgccttgaaatcgggcgggcatatgaaacgggggttgcgcaaatcttttcccaatctctctaagagatatacgaggtcgcaccacaatgagatgtcggttatggcatatttattccgcatggctatcttgtacgagttccaacatctgtcaagtacctgcggacgggagaggaaatagcgcaagtgttcgatgttgcccgacttcagcaatgtttccgcacggctgtccgaaaggatagccttgaagaagtcgtaaggcagtatgccgtgcaggttgccgtcaaagccatttcgcttaatttcggggataatccgtcggcgtggataggtgcatatcgggtcaatgtcatacaccttatgctggttgttcctgcggatttccatcgggctgtcctcgttccacaagtcgtagtagagaagtgaaaagccacgcaaccttgccactgtctcggacttgccgtcaggagcaatccaccgctgtgccacctcaaagatggaatactccgccttttgcccgactttctgacggctcctgacgaaaaagaaacgtattacctggtagcctttgcaggtggtgatgatggagaaatactcgttgtccacgaacaccctctttcgggtgtccgtgatttccaatgccgtgccgcagttcgggcaggtgcatccgcaaagcgtgtcggcaaggctgtgtccgcttttccatgcgtgtccgcactccgtgcaggtaatgacgccttttgcagtccgcctgccgtagtgcttgaaacaatggtggaaagcgtaggttctctgtgcgtttgtcagttcgggcagggttgcgctcagacggatgacttctttctgtatgggtgtcttgggtttcataggttcagaataatgaaagttcaacttgttgtgcgtttgtcttttggttcgccttagccttgttccggttttgcatcttgcgcagttcctcgtcttggtattggcggatggctctctgccttgcttccgccttttcctcgtccgtcagttcaactccgcataccatgacttggcacgggattggtttgccgatgtcgatgtcgtcctcgtcaaaatagtgtaccgcttgcgacaagacttcccctgcggtaacgcctatgccgttgcctccattgcattggcttttcgcccaatgcaacaaataggtgatgcaatcgtccatgttcttgttcggcttgctgtaacttgctgcaaacagcttgtcctccgccgcacggctgtccaaataggcttggatggtccgcttgaaatggtctgttccgttcatatctgtatgtattttagttatttgaaaaattctccgttggataaaaactcgtattcgttggcttcgcaatcacgctcaaaggcttcctcgttgctagcatattccacatcatccctgcaaaagcggaaaaagctgtcgatgcagtcattcatcaagtcatacaagttcgtatgcttgtcgggggatttcaggaagtcgtatatgggtttcagtatgtccatgtccgcacaataacccgtcagcacacaatcattggttacggatatccgacttctgcgctgtttgtggaagtcctttttgtgccaataggtcttgggcttgaaaaggttgtgccaatagttgttcacgatgaatttcagcaaccgcacaccgcacagttcttcctcttccccgctgtaatttgagatgaattggaaattataggtacaggcatcataattccacctgcttacctttaccttgaaaatctcctcaaaggctttcaacgttgccctgttgtcggatgcgtcatattcaaagcctttcaaccacttccaataggcgttctctttcgccttgtccgaaagctcgtccaccttgtaaacttcgtatttcctcgtttccgttctcataactttgctctattgttcgtccaacatattgtgataaaacaactcgtcatcccgtccgtagatttccatcgtagggttgttgtcgttttccgcaggggacagtccttccaccgtttcggggttcaattcgtagtcgcaatagatgacgttctcgtccataccgatatggctgttcacgtctttatcttcccatgaaagaatgatggatttggcttcttcatagctgttcgctttgatggagaagcgggtacgttcccagcaagttaccttgcaatccatataaaagtcaaaagtttccattgtctgtaatttaagatggttatacggttttctgtaaaatctctatgtggtattggggcgggcattccaagatgagaaaggcgatgaagtcctttcttgcctccttgttcaactcgtggtacaacctcctgaatgaggaaaagttaccgttgatgcacacctctaccatatactcgaagatgttgtccacctcgtaatacctgcattgttgtgccactgtcttgctgtgtcttttcgccatatccgtatgaattaaagggttaataaccaaatgaaaattccgatagctgccactactgaaagcagggcggtgaggatgccgaacatgaagttcaacatacccagcaggatttcccctgcgatgcccaccgccaaacctcctgcgcaaagggtaatgccccatgctgctctcaccattgcggacaatacgctccgcatagcctttccgatgtcgttcaatgtcattctcatatcttccaatttttagattgttgttacttgtcttgctcggatggggaggtcgggtcgagtcctttttcttttcgcctctccgtatgtccgatgtctccttgtgacgtcttccgaccgcgcaccggtcgttttcgtttcaggggaaaaagcaaaggtcaggggagtaggttcagcaaattttttcgacagaatactacctgagcctgcgaagtgtggagattgtggctaaaaaatttgtgttcctaatcccgtctttacctttgcccctgcaacgaaaatgaccactgatgccgtctggaatggcggcatggggacattggcatacacttggagagacggaaaggaaaagggggaagtatgtgaaatggcgcaacgcgccacaggaaaatcgaaagggcggcgcaactgacaagggaaagcctcgctttcctgccgccgtgacggaagtcccgtgaccgtcattgtcatgcgggcatggcttgcggtcgcgggtgttcctccggcggcatctgtctgaaaatggtcttgcctgccattgctccgattggcaacggcagggcaagacggttggaagacaggccacacatgacagccgggaatagtcgcaggagcagattcacgcttgccgtgtcctgcatccggcggcatttccggctgacaacggaaacgaaaaaagaaaaacgaataagacggtcttggccgttcagcacaagcacataaaagaagtgtccgcgacgatggcagtgtcactggtgacattgtggtcgtcgtgggcttttctttgcttgtgctgcttctgaaatgggcttgcgcacatcaagccggaagccgttttcagaacaggaaaaatgatggaggataaaatttgcgggcgaaataaaattgcgggaaattttgcaaagacggggactgttttgtacctttgcaaaaagtaaggacgttctttcgcttgatgcaaaatgaggcagattatagaagttcgctggtttctaaaccgttaacaagtctgttttgtttctctgttaattatctcatagcttgaaagatacaatttttattgtgtcttgccacgtgataggtgatttttttattgattcctgccgttgccatccatttggccagtaccttgttgatattgggttctgccgggagtccggcaaagacatgcagcccgtcttccgcaccgttcctttcaggcagccaacggacggcatggcgggaaagaggcaagtaaatcggtgtggtagttttttgcatcacggttgacatccggtattgttccccgtcctgaacaatatctttccatcgtaaggcataaacatcgctcaacctcaaaccgcagtaacaggcgaaaaggtaggcacgtttcacgtcttcgcgggggcattccgtgtcaatcagaacttttatttcgtcaatggtcaggtattcccgtttggattccggcaccttgatacgttctgtggctgcaagtgtcattatcgggttctccgggataacctcggcacggacggcggcgttgagtgcggtggagaaataacccacgtagtccgctgcactcttgggtgaaagcggcttgtcccaccgggtcttgtaggtgtgctgaatccagtcgatgaaacccagacaccagtccttgtcaatctctctcatcttcacctttttcttgtaaaggggaagtaaccggcagactgttcgtaacagtttcagtcctctcgcgccttttcgttcctgttcggcaagataggcttccatccagtcgtccagtagcattttggaacggacggatgtctttttcagtccggccttcgagtgagtcagttcgatgatgcgttttgatttgatggcctctaccgccgcttttgtggcccggttctgctccttgaccataggattgatttcgggcaacaggtacagtttcaagaactcgtaactgcgttttccgtcaacatagatgtcgagataataggattccgaaccgtcggcgagcttcttcgtgcgcacctttaccggttccttgagtctggtcgatttctttgttgttgccatatataataatgtatttagaatgcgtcgtcaaccaaggtgattgcatcgtcctttttcttgtctactatttttgcataaacctgtgtggcacgcacggaacggtggccgaggattttggaaacggtatagatgtccgctccgagcgtcagcagcagcaccgcacatgaatgacgtgccgtgtggaatgtcacgttcttctttacgcctgccttatcagcccagttcttgagactgacacaaaggttgcttgtattgggcagccctccaaagacaaggccatccggtgtacagccattacgttccggcaaccattttaccgcttgggacgaaagggggatataaacgggattggtggtctttgtcattactaccgacacgagccattgcccgcctgatatggaaatgtcacgccaacgcaatttccgtatgtcactgatacgaagtccgcaaaaacaggaaaacaggtatgcctgccgtacctgctcgttaaaaaatggcgtggctatcattttctttatctcctcgatggtcagaaaatcccgtttgctttcgggaactttgattttctcggtcatctccagtttgtaccaaggatttgattcaatcagtctctcacgtacagcctcgttcaaagcggtacgcaaagtggtataataggaatgagccgtcttgggagtaatctgttttccccatgcggtcttgcaggaagaacgaagccagtcgatataatcaatgtaaaactgtctgtccacatcacagagcctgacatctgcacggaatttcagcaagtttttacgggcgttgtcgattccgttcaggtcgcgtgcttcccggtgttcgtggttcttgcggacaatggtcatccagtcggacagcagcatatcggaagatttgctttccggtactgttcccaccttcgcattgagcagggcttctgtccgttctcgctgaatatcttccgccttgcggagtgtctgcgcattttgccgccttgctttggcagatgtttccggcatgaggtagagttgcagaaactcgtactcatgcccgccgtctacactacggtcaagaaacagggataaacgtccgtccgccagtttacggtgacgtaacttgaacggagatttctctattaatgatttcttttttcttcccattgtatatcaatgatttatatccatatacaaaggtaacaaataatccggatataagtatcgttttaggtaacaaaaatgtcgaataatagagatttttaaggaatacaacagaaatcatcattagttaataatacattgataatcagtatttatatagattttatctgtttttattttcccttcgtttcaatacattggctaatgggcaacgatttactgccaacaaatcctgttgggaatgctgacgattttcgggccgatacagtgggcgttcagcatcctgccaaaatgggaaggtgcttgggcgaagtggctgacacgctatctgacggtgcatttctacggggcgatgctctacttcgtgggcttctacgtgctgctgctctttgacattgtattgtgcatccaaatcgagaacctgacggcgataaccgccagcgagcagacgatggccgcctacctgcagaactcgttcttctcggcgggctacctgatggcggcttcgattgtagctctcaagtgcctgaaccttgttccggacttggcggcatggatgataccggagggcgacacggcattctctacccgaaacttcggcgagggcgtggcacagcaggcgaagatgacggcaaccggagggttgggcggcatcatgagataatccgcaaaagataatataaacccaataaaaatcataacaacatgaaattgcaagagaaaatcaaaagctggtgcaaggatgagaaatttatgtcctttgcacaggaacgagcgagaaaagaggtttgcgaggtggcggagaaccaccgcatcgacccgcagtatgaagaactggacgaagccttcgagtacgacgaccggtacatcgcccccttagtgacgtacctaacgtacaagctgcgtcttgccctgctgcagcggaacgctggtaagcgcaaaagaggaatctggtgggtgcttgtccatgtggagatgcagggctattacgtggagatattctcggcggagttcgagaatcttttgacggaacttcgggatgcggtcatacccatgctgcacacggaatatgtacagatgttgaacggtaaaagggaataaccgatggtcatcaagaatttggaaaacaaaatcagactggtgggcatcatctgtaccgcttttctcgtgggatgtgtcatcatcagcttgtcaagcatctggacagcccggacgatggtctcggatgcgcagaagaaggtgtatgtgctggacggcaacgtgcctatcctcgtgaatcgcacgacaatggacgaaacgcttgatgtggaagccaaaagccatgtggagatgtttcatcattattttttcacgttaccgccggatgacaaatatatccgctatacgatggaaaaagcgatgtatttagtcgatgagacggggttggcacaatacaacacgctcaaggaaaagggtttctactccaacattttgggtacgagttcggtgttctccatctattgcgacagcgtggctttcaacaaggagaagatggagttcacctactacggacggcagcgcatcgagcgacggagcaatatcctgatgcgtgaactggtgacggcaggacagctcaagcgtgtaccccgaacagagaacaatccgcatgggctgcttatcgtgaactggcgtaccctgctgaacaaggacatcgaacagaaaacgaagatcaactactaaacaacggagtttatgaatatcaagggattcaggcggatgctcttcggtgaaaagatgccggacaagaacgatccgaaatacaaagaccgttacgagcgggaggtgtccgccggacgaaagttcgcccaagcgacacgtatcgacaaggctgccgccaaggtacagggattcgccaacgcgcaccggatactttttctggtcatcgtcttcggtttcgctatcggagggttcacttggaacatctatcgcattacgatggcataccgcaacagccggccgacacgcacggcgacggaaatgcaggattcggtgctgcgggaaagacacaagaggctgcaagggggtgaaataagggaaaatcggaacgagaacaagaaatatgaaccgcaataaaggagtgcttatgaatacacgatttgaaaaatcagtccgctcgtcggacgaatggtacaccccgaaggaggtgctgaaagcgttaggcaggttcgaccttgacccttgcgcccctgtccgtccgttgtggccgaccgccgaggtcatgtatgaccgggacatggacggattgtccctgaaatgggaagggcgtgtatggctcaatcctccgtactcgcgtccccttatcgaacagtttgtccgaaagttggcggaacacggcaacggcatcgcgctgttgttcaaccgttgcgattccaaaatgtttcaggacgtcattttcgagaaagcgacgggcatgaaattcctgcgccaccgcatccggttttaccgcccggacggaacacgcggcgattctcccggttgcggcagcatcctgatcgcattcggagtggaaaacgcagaagtgctgaaaaactgcagcattgaaggcaagtatgtacaactcaattaaaagatgtatgatgaagatatttgataaaatcaatttcagggagccgaagtatatgcttccggctgtcctgtatatcccgcttctggttgcatcgtacttcatcttcgacctgtttcagaccgaaacggcggagattccggacaagacgctgcagacaacggagtttttgaaccccgatttgccggatgcccggcttaaaggcggtgacggcataggcagcaagtacgagaacatggccaaatcatggggtaagatacaggattactccgcagtggataacatagaacgagatgaacccgatgacaacaaggaagaatatgaatcgcaatacacggtggacgacatcgccctgctcgatgagcaacagcaggaaaaggctgcggcagcgcaaattgccgatgccaagacgcgcgagcaagaagctctcgcggaactggagaaagcccttgccgaagcaaggttgagaggacgcaatgaggtattaccggcgaccgatacggacagtaccgcatcggcgcaacccccgacggcaaccatagaggttaagggaaaaatagaggaagagagccgttcggtaaaagccccgtcagagaacgaaccgcccagcgaagtggtacgcaaggtaaagacggcttcggattacttcaatacgcttgcggtcaatgcccgtgaaccgaaactgataaaggccattatcgacgaggacatcaaagcggtggacggctcgcgtgtgcggttgcgtctgctcgacgacgtggagatcaacgagtgcgtggtcaaacgagggtcgtatctgtatgccaccatgagcggcttctcgtcggggcgtgtgaaggggaacatcaccagcattctcatcgaggacgaactggtgaaggtcagcctgtccctttacgacacggacggcatggaggggctttatgtaccgaacagccagttccgggaaacgagcaaggatgtggcaagcggtgcggtgtcggggaatctgaacatgaataccggcagttacggcaacagtctctcgcaatggggaatgcaagccgctacgaatgcctaccagaaaacgagcaatgccatcggcaaagctatcaaaaaaaataaggtaaagctgaaatacggcactttcgtctatctggtgaacggacgtgagaaacagtaaaaacggaagccatgatagagattgacaacatatataatatggactgtatcgagggcatgaagctcatggcgaacggcagtgtcgatgccgtgatagcggatttgccttacggcgtgttgaaccgtagcaacaaggcggtacactgggacaggcagataccgctcgaagcgttgtgggaacagtaccgcaggatcaccaagccgggaagccccgttatcctctttgcgcagggcatcttctcggcgcggctcatgctctcgcaaccccggatgtggcggtataacctcgtgtggcggaaagaccgggtaacgggtcacctgaatgccaaccggatgccgctacgccagcatgaggacatcatcgtgttctacgaccgtcagccggtatatcatcctcagatgatgccgtgtccaccggaacggaaaaatcatggacggcgcaagacggacggtttcacgaaccgctgttacggtgaaatgaaactggctccggtgcgtgttgccgaagacaagtacccgacctctgtcatttccatacccaaggaacacaagacaggagcattctatcatccgacacagaagccggtagccttgatagagtacctgatgcgcacctataccaacgagggcgatgtggtgctggacaactgcatcggttcgggtacgaccgccattgccgccatccgcacgggacggcattacatcggattcgagattgaaccgacgtattgcgaaattgccggacgacggattcgggaggaactggaacgtggtcatgggattaaagaaagcgaaataagggaaataaagaaataaaaaaataaaaaatatcaacagaaacgatatgaacaagaaaataattataactgcatttcttctggcggcaggactttttgccacacggaacgcacaggctcagcgtacatacgaagagatggaacggctgactgtcaatgaacaggtaacgaccgtcatcacagcctcggaaccggtccgcttcgtggatatttccacagacaaggtggcgggcgaccaacccattgagaacatcatccggttaaagcccaaagagacgggacacgaggacggtgaagtgctggccatcgtcaccatcgtaacggaacgctatcgcacgcagtatgcactcatctacaccacgcggataagcgaggcggtggcagacaaggaaattcagctacaggaacgggatgcctacaacaatcctacggtctcgatgtccacagccgacatggtgcgttttgcaagacgggtgtggaactcgcccgcgaaaatccgcaacgtggcgaccaaggcgcaccgaatggtgatgcgcctgaacaatatttactcggtgggcgactacttcttcatcgacttttccatcgagaacaaaacgaacatccgtttcgacatcgacgagatacgggtgaaactgtcggacaagaaactttcgaaggcaactaacgcgcagaccatcgagctgactcctgccctggtattggaacacggcaagacgttcaagcacggctaccggaacgtgattgtcgtgaaaaagatgacctttccgaacgacaagctgctgactatcgaaatgacggaacaacaaatcagcgggcgcaatatcagcctgaacatcgactacgaggatgtgctgtcggccgattcatttaacaccgctttattggaggaggaatgacgatgaaaaagacgttgaaaacagttttgttactgatgcttgtctgcatagggtttgccaccaatgcccatgcgcaacgcaacggcggccgcctctcgctcggcgtgggattgctgtatgagaacggcatggacgtaacgcttgcttacgagcatgaaatgaactaccgtcatgcgtgggagttcttcgccaacggctatctgaaatggacggaatgtaaatcttgcggtcatatttgtccggaatccttctggcgcaactaccgcacttatggtttcggtgtggcgtacaaaccttgtgtggtgcgtggacgcaaccattacggcaacttgcgtatcggagcttcggcagggagcgacacgaacaagtttcttgccggaatccatgtgggttacgagcacaattatgagctgcggtcgggatggacgctgtactggcaggtcaagagtgacatgatgataaaaggggcggatttgctgcggacaggtatcgtgctgggtgtaaaactgccgataaaataaaggaaaaacaaaaaaacgaaaatgacatgatacgaaagattcaatggattgcaatggtagtggcggcggtattgtgcgctgcctgtgacgcccatatcgacgtacccgatacggcggtacgtccggggcatattctctgcgaggacggcacggcattgtcctatgcgcagtatgaacaatcggggaagcgggcaatagcggttgtctttgataccgaacgccgtgaaggaacggaagggaacggctatgcggtttacctgtgggacattgctccggcggcattcgccgacagcctcggtgtcgcacaagggacgtcggccgacatcggggcattggacgggaacatgaacacctttgcgctgtacgacacaagggagacggcttcgcctatggcggaagcggtctttgacctgtggcggtacggacagagtgcctatatcccgtcggtagcacagatgcggttgctgtatgctgtccgggaaaccgtcaatcctgtcattgaacggtgcggcggtcatccgttgccgttggatgaatacgattgctggtactggacatcgacggaagtgtccggacaagagacggcgaaagcgtggctttactcgacaggaagcggcgcgatgcaggagacacctaagacacaggcgcataagctgcggcctataattaccatgaacaaataaaatgtgcaacgatatgaatatagatatgcttttctgtatagtattgatggtattgggggctttcctcatatactatcccatcaaagatgaatcacctcggcaaaaactgaaaaagctcgccgattctgttgcgtctgataaaaaggacattgattatctgattcaacgcttcagctaccttttggataacatggcggcagacaatgggaaaggttcggctctgagatgccagattgccaaattggaggaagttgtcaaggagttgaacggcaaacgcaaggaacttgagttaaacaaccggtcgatgacggatgttaatgacgaattgaagcgaagcaatgccgaacttttaaggaaggcttctgaattgcgtgatgagatacagcaacaggaaattaaaatccaacagcaggaagaatacatcaattctgtccagagagtcaaagaagggcttgagatagccttggacaacattcaggcagaagaggtgcattatctctcacagccgatattcagcatgaaaatgacgcctatagtcagaagcaaactcgaatctcatgggatattgtatgtcggcgacctgattcagctcaacgaggaatatctcatggaaatctggggtttaggaccggtagcacttgaaagaataaagacgaaactgaacgaaaacggtgtgtggttcggtatggatgtcatacgaatcaacgaccgttggtatcgtcggaaacaagaattaacaacggattgattcatggaagagagcaaagaattacaagggttctacaagatattccgtgcggtcatctatatctccgtgctgatggagttcttcgagtatgccatcgaccctgccatgctcgaccactggggtggcatactgattgatattcacgggcgcatcaagcagtggatgatttacaatgacggtaatcttgtgtacagcaagattgcgacgttcctgcttatctgcatcacctgtatcggtacgaggaacaagaagcatctggagttcgatgcccggagacaggtgttatatccgctaatcagcggactgttcctgattgtgttctccgtgtggttgtaccatcatccgatggaaacgaggctctacacgttgccactaaatatcatcttctacatggcgaccacgcttgtcggtgtgatattggtacatatcgcactggataacatctcgaagttcatcaaggagggactgggtaaagaccggttcaactttgagaatgaaagtttcgagcagagcgaagagaaggttgagaaccagtatagcgtgaatataccgatgcggtactattacaaaggtaaatttcgcaagggatgggtgtcgataagcaactgtttcagaggaacatgggtagtcggaactccgggcagcggtaagacgttcagcatcatagaaccgttcatccgccaacatagtgccaagggctttgcgatggtggtctatgactacaaatttccgacacttgccactaaactttactatcattacaagaaaaaccagaagctcggaaaactgcccaaagggtgcaagttcaacatcatcaacttcgtggatgtggagtacagcaaacgggtgaaccccattcaggcaaagtacatcaataatcttgcggcggcgagcgaaacggcggaaaccctgttggaatccctgcagaaaggcaagaaagagggaggcggaggcagtgaccagttctttcagacttctgccgtgaactttcttgccgcctgtatctactttttcgtgaactacgagcgggaaccctacgatgcaaacggaaagaaactatatgcggagaaacggcaagatccgcagacgaagttctggaagccgacgggtgtcgttcgtgaccgtgagggtggcagcatcgtggaacctgcctattggctgggaaaatactcggatatgccgcatatcctttcatttctcaatgagagctaccagactatttttgaggtactggagacggacaacgaggtcgcgccgttgctcggcccgttccagacggccttcaagaacaaggcaatggaacaattagagggtatgattggtacgctgcgtgtctataccagccgtttggccaccaaggaatcctactggatattccacaaggatggggacgacttcgacctgaaagttagtgaccccaagtcacccagttatctgctgatagccaacgatccggaaatggaaagtatcatcggagcgttgaacgctctgatattgaaccgtctcgttacccgtgtgaacaccgggcaggggaagaatattccggtcagcatcatcgtggatgagctgccgacactgtatttccacaagatagaccgactgataggtacggcgagaagcaacaaggtaagcgtaacgctgggttttcaggagttgccgcagttggaggctgactacggaaaagtgggaatgcaaaaaatcatcacgacagtgggcaacgtggtaagcggttcagctcgcgcaaaagagacactggaatggttgtcgaatgacattttcggcaaggtagtacaggtcaaaaagggcgtgaccatcgaccgggataagacgagcatcaatctcaatgagaatatggacagccttgtacccgcctcgaaaatttcggatatggcgacgggatggatttgcggacagacggccagggatttcgtgaagacgaaaaccggtacaggaggctcgatgaacattcaggaatcggaagagttcaagactacaaagttcttctgcaagacggatttcgatatgaaggagataaaagcggaggaagcggcctatgtaccgctaccgaagttctacacctttaagtcgagggaggaacgggaacgcatcttgtataaaaatttcatacaagtcggacaggatgtaaaagacatgataacggatgtactgaacaagcgtggggcgaaataaatcaaaatccctgcaataatcacgaaattattgcagggatttttatattcaatttcagttacccaaaatcttgtgggcataaagccggttttacggacgtaaatgaattatctgacagtttccgatttggaatcgttttccgatagcagattttgtaatttgtcgatgtccggtagagtcttgcgcagattctccggcatttcttgggctgtgcggtatgtcgccacgcccataggcttatcatagtcgcgcaccatgatttcgacaaacttgcggttggcatcctggcataggacaataccgattgaagggttctcgtgcggtttcttgtcggtcatgtcatacaccgtcaggtagccgctaagctgtccgagataattcgggcggaacttgccccgtttcaactccacgattacgctggcattcagttctctgttgaagaatacaaggtcagcaaacatttcttctccggcaactatcaggcgatgctgactgtcgataaaagtgaagtcgtttccaaaacggagaatgaactgcttgatattggttacgatttggttttcgatgaccttttcgttccagtcctgttcgcgttctcccacattctccagattaaccatttcgagcatatactcatccttgaacgccaatatcgcttttacggcataaatggcttcgggcagcacttgaaggaagttgctcggcaaagatccgcgatttgaatagatgtcttctttcaagtaatttttgagagaggatagcgaccacgcattttgagcggcacaatggatatagaacaaccgttccgcgatgtcttttgaacgagtcaggatttcaatatgatgtgaaaagctgatcttgacaaaatcgtcccaggtaaattcggtattgaccggttgcccgataagttgcagcagtagatgctcgtcaatatccaattcgcccaacgctgttggatgaattaaagccgtacccttttccgacgaatggttttccaattcgcccaacactgttggacgaattaaaaacgtcctccattcctcatagaatgagcgcatccgtttcaaccccgattcagaaaagccgtgcagaccgggcaactcccgttgaaggagctttgatatggtaggcaatgctttagtaccccaacagccgatgcgggaattttcagacacgaatttccccactccaaaatacaacgagagagtttctttgttgaccgcagccgcacttctataccggcagcgttcgatggcatgtttgattatctctactgcctctgcatattgtgtataatccgatgggataacctgttgttccatatacatacgtttttgtgccgcaaaggtacgaaaaatacgggatatacagggcagaatgccaacatattatagtgccgcgtgggtcttattcggtatttttagcgttccggtgtcttgcactcgctttgctgccaatctactcactcagatgttcatgcgtctggggcgtgccgagaaagctggtagcggtgtggataagattgtgagcggttggcagtctttgggttggccgcttcctactgtagccgaggaaacacgtccggactatgttgtgctgaccttgcagttagggatgaaaacccgacaagaaaacccgcaagaaaacctcgcaagcaggatttgagaaaagagcaaatcttggagttctgtgttgagccgcaatacctatctgatattttgcaacatttaggattgaaagatagggaaaatcttatggaggtctatatcaatccgatgattggtacaggggtattggaaatgacggagccggacaatcccacaagccgtaacaacggtaaaagtggaacaaggacttcaaaagtgagtttataataggatattgcggcttggacgcatccaaccgcacacgaaaacaccgcccacgtagaaaaatgggcggtgttattcggtcgctcgcttattcaggctcgtgtaccgcttaaaagtacggcaagttgccggtcgcagaatttgtcgtattcctctttgtccgtaccgctttcgacggctcggtcaatgacatcgcccaactcgtcgaagcatacttcctcattgacgcactccgcaccgttctctttcagcagatatacctcataataatcggagccgttgagtgcgataacgacatttccggcgtgcaaccgcccgtttactttaatccgcaatgccggcaaatcccggaataccgtagcgacaaaatcgccgattccccacgacataagaatgggcatgggtgtaagtgataccaattgttctttgatggtctgtgcgatgtgcattacatactctttatccataactttgatttttaatatgattattgatttatgttagttgaaccattcggggttatcctcttttaattccgtgatgagttcatcgtccggtaatttgagggttttcgcatcggtgaaaaagaaaacctcgtcatatatttgttcggcttccttacttgcaaaaccttcgttttcgtcctcgaaactgcccggatgaagtgcatcgagcagagcggtagagccgataagtaattcttcaccttcgttggatttcacgatacggcagatgtagatattgccgtcaaattgtagttctttcgttttcatacatctgttatcttaatgggatgtgtttcccgtgagccttgaggtattccatgatgcacttcgcttcctcgtgcgatgcacggttgcggtcgtcgtagttgcgtgtctcgtccgccatgaccacgatacactcttttaccaacctgtaaaggctttgctgcagtgtggggtgcatttcggggatagcggctgcaaaccgtttggggttgaagccgtaatcgttcactgccctttcccagtctttggcgagctggtactccttgctttccttgatgttgtccataatcttgaattttaatgatttgtttttttcttccctccgttcggttcctttctgtcggaaccgctttgggattttatggatgcggtacacggttgtcggtacagcttcatacggaaggcttttcctgccaattactctttctgaggaaaggaagaatttgcaggaaattcactttaagccgccggatcaagcgcgacggccgacctttgcatctgataaaaccaaaccggggctgacaggggacgaagccggggaaacgctataaaagggaagttgaaaatggtaaaaaagagaggaaacggaagctatgaatggaagaagggcgggtggtgacgggttcgtcagaaagttagaagaggtacttgggtcctttgtccggagcatacaaaaatgaatagagggcggatttctccctccccctatccgttatgacaacaacatttgtcaggcagctatttcttccgcttgcggttcggtctgtgcttccgcttcgggttgcggttcatcgggttgttccgcttcctgcgtggcttgttcctgcaaagcggctttcttttcctcgatgcgttggtgtcgcttttcgtacacttcattatatccgtcttggatattggcaagttcttcgggcatatgcttttgagcgaagtcaagcaacagggaggctgtggcgttgttaccgaatgcgtccttgaaattggcaatcagataatccctgcggataacggctttctgcttggcggtaaggttctcgatgatgcgcattttgtcctcgctcgtaaggtagtaataagagcctttatcttcaattcccacctcattgaaatgctctttgcggagtgaggagagcaggaagaaatacaccattttctcctcgtcctgcccaaatttgcgctctgacatatcgacctctaaaatccgctttttggtgtcttcaacggtcttttcgagggcaatctccttgttgcgtttgtcctgcttttccaacttctcgataggtgaaagcggcattttggttgccgtaccgtttgcggttgtagcggtatttgcaacatagcacagtgtaatgtcgttgctctcaatacggagatagagggagatttctcctgcttcgcttcgggtgcggattgcttcgcatttctcggtgtagccgttcaatttctgctcgtaatcctttactgcttcctcgtattcctcggtggtatcgtaatcctctttttgaggagcttgggggcattcggggtatttcgttgcataggttttaagactttccacctcgtagcctatagcggtaagtcggtcgacgacggcttcattgtaattgtagctttcgtggcagaggggaacggcagggtgctgttccatgagccgcatagccttttcggtaaggtgcgatgtgttcatttccacaagacaagcacggttggcgcaatttccgcaactaccctcacagaataacatcatgttattggtattgtggggacatgaaagacaaagggttttgtcaaatgaatagcgattgaggtctgcggtatattgccgttcgatgctctgtgccacctcggaggctttcatgcctcgccaactattgtactgcaccccctctttcagatgttggtcgtacacctcacgctgtatctcttccccataacggcagatttcacttgccacgctgattgtgatttcgtcctgttccaacagcacggcgatttcgggtatcaaggaaacgaatttaagtcgtgtacggatatacgcttccgtcttgccgaactgcacggtcaaggattggacatcgtggcgaccgctgtctatgagtttttggtaggcattggcttcctcaatcggggtaacatccttgcgatgcaggttctcggtgattgccatttcctcggctgtctcgtctgaaatttccatgacggtagccggaatttccgccaattcagccatgagggaagcacggtatctgcgttctccaaagacaatctcgaaacggttgtccgcaatagggcgcacaccgataggctgaagcactccctgctgacggatgctctcggcaagttccgcaaggcttgtctcgtcaaagttcttgcgtgggttgtaactgctcgactgaatgtctgccaatgctaccgatgtgatgttcttctctactgcttgaactgctgttgttgccataatcataaaatttaattggttgatatttgttttgttatttttccctcttttcggttcttttttctgcctgaaccgcttgggatttacagatgcttcaagggactgacgaacaagctattttcaacgctttttccggaaaattactctttcacggaaaggaagaattttacgagaaatgcacttcaaagcggtgaaatcaagcgcggcagtccaaatttgcgtctggaaaaccaaccggcgatggcaggaacgagaccggacaagcggcaagaggaatggatagaaaggggaaatgcagcattgcagctataagaggcgaatagagcaggagaacagccaggggtataaacgggaaaaccgctaccttgtggacatgtgccataagatagcggtatggtataaaagttgattgggcggattgccgccccggttatttctcgtgcttttccaaatactctttcatcgcctcgttcacaatatttcggagcgacatattcttctcgatagcgaggtatttcatccgggtatgaatactcttgtcgataacaaaattgcaatgcacggcaggttctttttccgctttgaccggtgcaggctctttcttttgcgtggacttcccggtggatgacagcaagccgtccagtccgcttctcatgccgtttttcaatgaatcacttttgctcatatcgtctttactttaatttcaacacttcttttgctaactccatgtagtcctttgccccgttgctgttcttgttgtattcaaagatgttcagaccctttatcggagcttcggccaatgccacattgtcccggatgacggtcttgaacactttgtcgcagaatgattcgttgatgagttccgcaacactcttgttgagcgtcttgcgcttgtcaaactgtgtgatgacaattccgccgatgttcagattcgggttcaaacgggttttgacaatctcgaccacatttgtaatcttcgccattccgcgcatggcgaggaattgcgcctgtaccgggataatcaagaaatccgcagatgtaagtgcgttgagtgtcagcaaacccagcgagggcggacagtcaatcaggatatagtcgaatttacgggtttcaagcaattttgcaatcagccctttcagtattaattcccgccccggctcattgataagctcggattctgccgctgacaaatcaaggcaggacggtacaacggaaaggccattatttaactcgaataccgttaacgggtattcacctttcattgctccgtacaccgtccgttcctcttcgatggagagaccgcaggattccgtgaggtttgcctgaccgtccatgtcgatgagcagtacacgctttttcttctgctgcaatgcggcagcaagattgatggtggtggtcgtctttccgacaccgcccttgtggttcaaaacagcgattatctttgccataaattcctatctttatttctgatacaaagatactactatttttagtatttactatgattagtgtgtactattttactactttattacattttagtatcgtagtatctactactatactaaaatactgattgactaaatgtagtgcatactatcctttgcaacgggagatttcctgatatcctactttactaacattagtatgtactacatttagtatcgactgtatagcagtgaagtaaagcctatttgggaggtgtatataaatggatattgccgccatcagatcggagtacaagaaaaatccccctgtcgagttatcgcaaccgaacagagggaaaaggttaagatatgattatggtttaagcggccttagtagtaggttcgtattcggcagccgttgtttcggatggagttagagagcgttccgcatccttgagactttcgtcaatcttccgctgcagctccttgcactccagtttgagttttaccaattcatcggctttgctccactggcggccaacgatgtcctgcaatatggggatttcgctttcaatccgctccaccgtcttttgttgcttctcaataagtgagggcaatttgtttagtgtagcctgcggatattgagcagattccacgaagccaagcggtaacgcacctgtcagtccacaacggtatttaagcccgcttgtcccctcgacaaagaacgtgtttcggtcaaatgtaccgtttatgctgtactcgctgcgtaccagcaaattcagccctgtaaacgtgccaatcgtaccatacgctccgctacggtaggttttggcgatgcggtgtaattcccggcctgtttcctcggctgtagcttgtggcaggttgagaagttgtgttacttttgtcccctcgtaagagttgaagtattcccaatccttgatgaaaccggcctttgtacgctgtgtctttgccatatcttcctgtccggcggttattttccgctcggcacggatgcgttctttcttgaaaatggtctgttccttttccaactgcataatcttgttgtcgagttttgccttgttcagcaaatcggtgttgccggaaaggattgccacgaactcggcgaagttcatgccgttgtcctcgtccatgccgccctcgtcgatacggcgcacggcgattgtgccgttattgatttggttgatgaacatctgcttgtttttcagcaaattgaatttgtaggcatcaagtgtcttttccgtgccgtaaatcaccacatccaccacgttgccgccccacagtttcacggtgttgcccttgcgtaccgccctgccgttgcgctgctccatgtcagccggtcgatcgggtaggtcaagggcattactgccctcttcccccctcagaaccgtacgtgagggtttcccctcatacggctcaagcttttcaaagtctctgttcgtgtgcagagaccggctcatcctacttcttgtttccattgtttttacgggataatttgaaacattcatcatgaaccaacagattgcatttccgtccgtcttggacggttggcattacgttccatgccttatacgtgtcaatcggttcaccacatatcggacatttccgcccttgcttttcccataggtaaagcagggacttacgtcctttcagtgtcacaagcatctttgacttcattcttttattgaagtacaggcggcagtctgcgtcaaacggattcatatccccttttatctgcgtatattgcaggaaaggaaacgaagatgccagtttcagcaaagtgagttggtcttccttgccgtttgatttcttgaacttagccgcaaaagtccagctgttccctcggatattgtgccaataacggtcttttatccaccgttttcctttcttggaatggcggcgtttagcccattgccacaaggcgagaaatatctgatggtcgattctgtgaaaagaatcacgtgtcgccccatgctgataatatgctccccatcctcggattttagcattcaacattctgattaatgattcctgcttgcaacccttatgaccttttgtaaccttacggatattttccataaagcgtttttcggctttcttggtcggctttgtcaatatttcattgccgtatttgcgaatattgaaaccgaggaaatcgaaaccgtcacgaatgttggttatcaccgtcttttcttcggataaggtcaaacctctttcagacataaagtcggctaccaatggcttgatttctttttcaagtgtttcacggttctcgcaggtaattataaagtcatcagcatagcggacaagattcaccattggcgaatataacttgccttttattctaactcgtttatatttctctgcaaggactttctgcaatccgtccaatgtcatattggcaagcgtgggagagataatgccaccttgtggcgttccctcctctgtcgggaacatctgtttgttgaagatatagccgcatttcaaccattttcggagtattgctttgtccatagggatgttggcaagcaaccattcatggctgatatggtcgaagcacccctttatgtcaccctccaaaatccattcgggagaatagcctttccggagaatgttatgacattgctgtaccgcatccatacagcgacgttccttgcggaaaccgtacgaacgtgtgtcggctgttgtttccgacactggttccaatgccatgaggtaaagtgcttgcatggctctgtctttcattgtcggtattcccaacggtcgcagtttgccattactctttttgatgtggactcttctcaatggcttcggcaggtagcctctgcgtttgagctcacttatcgcttgtgtttttgcttcgggtttctcccatgtttccatgtccaccccgggggtgctaccacctccgttagaagtaactctctttacggctaaggcttttgcgtaaaaagagtgggtcagcgtccactgcaaggctttcaccttgcccgttctgccttccttctgagcctttacaatgcgagcttgaagcttcttaacagcctgctccgctttggtccagtctatcctgtcccaattcgtttgcaagttatcagtcggtgcacacgattggtcgaggagtttttctttgattttatcgttcatttgcattcctactttaaaaaagttctaaaagtctattgtaaagaatcaccatttggcaacattcggtttgttttgcctaccgagtgtcgccacagaagtctgcccactttcgtgtcggatgatgtcgcctacatcagcccgtgatgtcggttcaatccgtatccgttccattacagaacggcattcgctttttctgttatcttatacctgcacaccattcggctttcattgctgtcagcttacctgccatttttacatggcaggagatatacaggcttaccatgttccacatagataactaacggataggttaggttctgtctcatcctccggcggtgcttatatccgtgtaatcctaccatggaaaggattaaccgaccgcttcccttttgggtagagtgtaccagtatcttacactctttcgtgacattacgaagtttactaacagttcgcttgcgctaaccatactatcctgcctcgccactctacggtatgatactaaccgtacttgacttcccctcacggttctgtcttgtcttgcgaaagtgtactttgtcccaaccgcttaatacaactattaaggtgcatcggtggtaggctaccgctgacggaacagcgggttaaagctgatacccgtaagtatcattccaacaattatctatgcgacttcatgtcgcacccagggaatctccaaatgatgcaccgctacagccctctgctgggcgttcacccctgttcctaacatggtggtgctgccgaaaagcacacgcaccttgccgttgttcatgtcctcgaacaggcgttttcttgccctttcggtggtagcacactggataaactgcacttcatcggtcggaataccgaggttcaccaacttttctttgatgtcggtatatacgttccactcattcggcttgtatgtgccgaggtcgctgaacacgaactgcgtaccccggttttcatttgagcgcatataatattcatagattgttcttgcacagattgaagccttgttttcggcatcgtcgctgaacttgtcgcccaacaaacgcatatcgagagccatttttcgtgccacattggtagctaccaacatttttgccttgtcgagattgtcgggttcgggcgtatcaagtcccaaatcctcccactgtccgctgtgtgcaaaggaaaccaaacggcctatcatttcctcctgctggatagtgggcgcatgagaaagaaagcgcacatttttatccggtacatcgaggtttatcatgtcggcggtgcggtagtcggtaatctcacgcaggaacattgccagttccggcactttgatgtaggtgcggaaacgctctttacgcttgattgcacctgtcacgttcagttcataatcggctgttttctgcgtaaatatcgccgcccacgcatcgaagcaagaaatctgctgacgttgcaattctcttggtctaaggtacttaaacatcacatacagttcggtcagggcgttcacaaccaccgtgcccgaaaggaatgttgcgccgaggtcacgtcctgtccggtgctgaatgtcacggatggcaaacagcaggttcatcgccctttgcgagcctttggtattgccgataccggcaaccctcgtgtggcgtgtctgaaatattaagttcttgaaaatgtggcattcatcgacaaatatgtggtctatgcccatcgagtgaaagtccaccgcatcgtctttccgctcgttgattttcattttcaattccttaagtttggctgcgaggttctgtttgcgcttctccagaccgtcctgcatctttccgctgcggtagcgcatggtggattgttccaagacttccaaattgcgctccacatcggccagttcttcggtgaatatatctatcatggtctgttccgattgcggtatcttggcgaactggtcgtgtgtcagaatgatgcagtcccagttgttgttcttgattttcgagaatacctctttgcggttagcaggagtgaaatcctctttgcccggataaagcacctttgccgaggggtaagccttgcggaacgtgtcggctatttcgtgaacattggctttcaagccgataatgagcggtttctgcaccaatccgaggcgtttcatttcgtaagcggaaacgcacattatcatcgtcttgcccgtgcctacctcgtgccagcagataccgccgccgttctgcttaatcatccaaatggcatctttctgtgagggatagaggctgtcatacggaaaattctcgaaagagagctgcgggaaggtctgtgccgagccgtcataatgcggacggacatagcagttaaaccgctcgttgtacacccttaccaattcgtcccttacctctatcggctgacagtcgagccactggttgaaacggtttcttatctcctgtatcttggtggccgcttcctgtatggcttcctcgtccggcactcgtaccgcttcgccgttccgctctatctctttggttatttcgggaacggtgtcctgcagggcgtgtacgaacaaatcctctccgttgtaattctttacggaataggtgttatagactacaggggaatatccttgtagccgcactaaataggtgtcgttcacgtcaaaatacatcacatcggtttccgttccgaaaagttctgtggcaaaatcggcgtacagcttcgtgtcaatccaacgctcgcccatgttgatgtcgagttcctcgtagggtatcgcttcgggtatggcttcctccaatgcctttacagcggtttccgtccagtccttttccttgcctgtgagatcgggaagataagagcctgtttccttgcttttggcgatgacgtttccggctatgaacttgcctttgtgttcccattctccggtggcagggttatagaatatctcgcctttgaggtcgtcgataacctcgtcctcgtccttgcctgtggtctgcatcagatagtccatatccacacagccgtaaaagttaaggcagcttgccaacgcttcgcccggtgtcagttgcacggtcgtgtctatcttcttgaacgctacaggctcacgcatgatgtcggatttgaatatgttgcccttgacctgcatttctattgtaaagacttccacgccaaggctgtcaagcatgataaattccttgttgtcgttctcgtggaaaaagccccatttggcgacaaaagcatcatagcaagcgttcagtcgttcacgcagttgcggctgttccatctgtttctcctgctctttgattgcaagttcaaagtatgccttgcggatagcgaaatagtcgtttgccctgtcggtgttcaccttgccctcgtccaccgggacaaaatcggtggccgtctcttggtagaggtcggatttgcggtattggataacgcccacctgcccctcgaacagtaccattgcgccctctttcatccacgcttccggctcgtccgtataggctcgtctgccttttggtggttgcttaacggccacactaccgaaaagggacatttgcgtgtgtatgccgtcctgtccctcacttgtgaaaaggcttttgcggaaatagcggccaaagtcgagtttgagcaatgcggcgaggtactgcgacatggcgttttcatcaccctgccactggtatttgcgtacatacttgccgtactggttcatcgcaatgcggctgcctgttgcaagggtggttttcgacaatgtgaaaagtttgttggcgtattcggtcattgtgcctgtcgtatctgccttttccctgccgacctgcaaaaagagctgttccctttgtgaaagtgatgccttgtgtgtatgtttttgaaatacaagtaagtcactgcctacctcgataccgcttgtttgcatgaaaagcatgtcgggcagacgaatggcacttatcaaatcagcatggctcacaaggtaatcacgcacgaatttgttgcttggtgtgtcggccacgccccttgatgtgacgaaagccaacagaccgccctcgttcaaaagctccatagccttgacgaaaaagtaattgtgtatggtcttggtagcctgctcgtatatgccgcctttcttccagagttccgcatcgaacacacggaagttaccgaaaggtatgttggaggctatgacatcgaatttcgtatgtttaaaaccctgttcgtctatcgtttcaaacccggctgtccgtgtaatcgtgttgtcattcagcagggagagtatcagacccgaaaccgggtctttttcaatagcatagccgcaggtgtcggacatggctaccgggaggaaaccgccaatgcctgcactcggttcgaggaatgagcgcatttgcagtccgttatccttgaatgtagtgtgtatttgttttgttaccgcttgaacaaggaatttcggggtgtagaacgctgtcaggacggaggctttgataccctccatgacgttgtggcgcatgggttctgtgaaatgtgggtaggtgtcgataagctcctgcaatctttgtatcggttctaccatgtcgccacttacaggcttttccgtgccgatgttcaatacttctttgataccgccaaaccccgaatatagggataaaatctctttttcctctgttgtggcttgtctgccttgaatgtggatttgtaacgctgtctttatcgcttccacgtttgccaccaatgatttcaatttgttgtaactcatatttaacctttctttttatttccctttgttcggtctgtttgcgaccgccgggaagatttttctgctttcagaaggtggtgagggacaatcggacaaggctgatccgaaaaaatacgctcgacagacggagaggaagatttttacgtgtcactcgcagcggcacgccggccttggcaagattggagcggccggttacctttgcggaaaattctatcccgtaggtcgcacggcagcggacttgggtttaatgggaatccgttagaaaaaggaaagattatgggtaaaagaataaggcggccagccgggacggacttttcgacggactgtcttgggactacagagggcaggatttatcccgccccctgtaatgccaagtctgtccgtgtccgtccttttgcaaaaaggggcttcacgcactttatgtaaggtgttacacaaaatgcgtgaggctgcttgaagcaaactggccgcaggatgtaaggctataagagggagaacaggagttttataaaaggtcgttggtcgatcggaacaacaaaccgtaccgagactttgcccgatacggtcttgtcgttgccctgcatataactcagtctatgtcatagcctatcatgtattcatcgttgataagcagataatagtagccgttgccacaattccggtactctttgctgaatcctgccgccatatcgccattttcgcgtggctcgcaccacagcgtaccgtcatagccgcaaaagtcgaagcgtccggtggaaaacttttcaccttgcttcagtgccgttctgaaacgagccatatcccaactgccgcaatacttctcgatggtggcaagtccgatacacttgccgtcgatgcgtgtgccggtcgtgatgcggttctcgtagagggatttatccaaatcggcattagcgattttgcgaagccaatcattcgtatgcgtggcaagccgggcaagtttctggtatttcaagaccagtttcttttctatgtccgctgcatcttcgggagaggatgacggatagtatatcttctcaatgcttgcccaatctgtgaagatgtacccgctttttcgttttttgggcgcaataatgccgatgacgttttcgttgcggttgataaacagccgtctgcgttttcctgcaatccttacatataaagaggcgggattctgctcgtttcggagataggcttctgccggatggatagttgttgtttccatatctatatgaattttgatttttgctgttcctatttgggtttacctgttcaaagttccgggattgtgccgttcttatatagaacaccgttccgataatgggacacgatgcccggcttaagtcccatttcctcaaaggctatatgcctgatatagtccttgtattctttgccaatgaaattctttccacaaaggttgttgaaaatcatagggacggaaaaaccgtcttcgctcgacaatatcactttgccgtcttgtctaatttcttctaccatacttgtttacttttaattggttgaacttttctgctgattttttctttttccctgctttcgtttgccgtgcaggtttgttttcagctttttgaggcagccagaggatgaagctgtggcatcataagccaaacccggatagaaaaccgaccgtgcaacagtctgttttcgtcatccgaatgcaatgcggcttggcgattatgcgcttcgtcctacattcgccgacgaaaagagtaaagaatgacctgccgataaacgagatgtgacaacaataaaacaggaaaatacgatttggtaaattgtcattgtacaatattgaacaaccactaaatatcggcacaattttaatttagtgccgatatttagtagatgatgacaaaaggttatttacatatagattgttttaaataaatacaaattttcggcactatttctgaatagtgccgaaaatttgctatatttgcaggcaaaaacaggatataatatgagtaataaaacaacgacatccatacttgaatacgctgaagtacaccgtgatttcagcatggatgacttgtttgcctatcttcacgaaaaggttggtataagcaagtcttccttgtcatggtatctgttcaagctcgtgaatgaaaatgcactggtcagaaccggacgcggaatgtatgctaaagtcatgaaacagccctttgttcctaaactcataggtgaagtaagagaaatttacgattcgttgctggtcaatttcccatttgcgaagttctgcgtctatcagggggatattatcgcacccttgcagcatcacctttcttccaaccgtgttgtctatgtggaaacagacagggattcggcagaaacggttttcaactttttgaaagacgggaaccgtgacgtctatctgcgaccggacaaagatatgatttaccgatatgtagatatggacagccgtgtcttttttgtgaaaaatttggtctcggaagctcctttgcagaaagtatcagatgtaccgatgcctacactggaaaagctgttggtggatatattgagggatgcggatttcttctacctacaaggcagtgaaagcgagcatatctttgaaaatgcctttaacctgtacgctgtcaatcgaaatcggctattcaggtatgccggcagacgtaaggcaaaagaagaaatattgtccatattagaaaatctgaacataaaatgataaagaaggagtgttttacggcagaatggatcgaacaggtttcatccgaattgcactataatgataaaaatctgatagttttcctccacagtatttacaataagcagccccgtcctcatgtccgtccttaccacaatgcggacatttcagggccaccctgcgtctatgttcctggatcatagacgcagaaacaattcctgtggggactgcaatgatggtatagcccagtaacattacaatggccgaaaggaagcgccctagcggagtttccggagtgatatccccataacctactgttgtcatcgtcactatcgcccaataaatactattcggaatattattgaaagaagtgcccggccgctgtccctcaatcatatacatcaatgtaccgatcgaagtcaccaatatcagtacaaacaagaaaaaaacaataatcttccgactgctgaacaccaaagaacgcaacaagaaattaccttcattcagataattgaaaagtttaaagatacggaacacacgaatcaaccggaaagtgcggatcaccagcagataacgtgccgtgccgaaaagccagcctatatataaaggtaaggtagccaacaaatccactataccgaaaaaactaaaagcatacttgcgcggtttaggagaacaataaagcctcaacacatactccaacgtaaagaagaaagtaaaaacatactccgacactcgcagataaggcccgataacagcatcccaactcttgatactctcggcaacaaccaccagaatactcaagacaataaaccctatcaacgccacatcgaataactttcccatcgatgtgtcactctcaaaaataatcacatatattttatgctttaatttctcatcatgcagtaaattctgccacctgttccaaatatgcttcaagaatgccataattttttataatagaacgcaaatcattcataattataacaaatattgcccgatttatgtcctattggtcactattattttcactatatttgcacaaaaccaataaaataatagcatgaagaaacaacttatgacaggtctgttcacagtcctcgcccttacagcaggtgcgcagaccttccaagaatggcgcaatccggaaataaatgcggtaaaccgtgcgccgatgcacacgaactactttgcttttgaaaatgcagatgcagctaagaaagcgaacaaaaaacaatcaaccaactacatgactttgaacggaacctggaagttcaactgggtgaaggatgcggattcccgccccactgatttctggaaaaccggtttcaacgacaaaggctgggatgacctgcaagtgcccgccgtatgggaactgaacggatacggtgatcctatttatgtgaacgtaggctatgcctggcgcaaccagttccagaacaaccctcccgaagtgccgacagaaaacaaccacgttggttcttaccgacgtgaaattgtagttcctgcctcatggaatggaaaagatattatcgctcatttcggctcggttacctctaacatgtatttgtgggtaaacggacgttatgtaggctacagcgaggacagcaaactggaagccgaatttgacctgactccgtatttaaaaccgggtcagaagaatctgatcgctttccaagtattccgctggtgcgacggtagttacctggaagaccaggatttcttccgctacagtggtgtgggacgtgactgctatctatatgcccgcaacaaaaaacgcattcaagatatccgtgtaactcccgatttggacgcagcttatcaaaacggtagcctggctatcaatctggatttgaaaggcagtggcaaagtcgatttggaactggtggatgcacagggcaagcaagtggcaaccgctaccgccaacaaatccggtctggtaacgatgaacgtagaaaaccccaaaaagtggagtgccgaaacaccttatttatatacgttgcgtgccagtatgcagggcagcaatgaagtaattcccgtcaaagtaggtttccgcaagattgaattgaaaggtgaccagatcttagttaacggtaaagcagtcctgttcaagggggccgaccgccacgaaatggatccggacggaggatatgtagtatctcccgaacgtatgctacaggatatccagataatgaagcaattcaacctgaacgctgtacgtacctgccactacccggatgacaacttatggtacgacttatgtgaccaatacggtatctatgtcgtagccgaagccaatatagaatctcacggcatgggctacggcgaaaagactctggccaagaacccctcttataagaaagcccatctggaacgtaaccagcgcaatgtacagcgcggattcaaccacccaagcatcatcttctggtcattgggtaatgaagccggcgacggccccaacttcgaacaatgctatcaatggattaaagcagaagaccccagccgtgcctgccaatatgaacaagcacgccagaaagaccataccgacatcttctgtccgatgtattatggctacgaaggaatggaaaaatacggtcaacgtaccgatgctaccaaaccattgattcagtgtgaatatgcccatgcaatgggtaactcgcaaggtggtttcaaagaatactgggatttgattcgcaaatatccgaacctgcaaggtggatttatctgggacttcgttgaccagtcctgccgttggaaaggaaaagacggtgtgatgatttacgcttacggtggagacttcaaccgctttgacgcttctgacaacaacttctgtgacaatggtttgatcagccccgaccgcgttcctaatccgcacatgtatgaagtaggctatttctatcagaacatttggactactcccgccgatttaagcaaaggggaagtaaatgtgttcaatgagaacttcttccgtgacctatccgcctactatatggaatggcaagtactgaaagatggaaaaataatccgcaccggacgcgtggatgatttaaaaatcgctcctcaggaaacagccaaaattacgttgaatatcggcaagacctgtacctgcaaggaatggttgctgaacgtttcctacaaactgaaaaaccgcgaaggtttgctgcctgcaggtttcaccgtcgccaagaatcagttgacactgaatgattacaaagcaccgtctatggatttgaagaacgtggaaacaaccaatgtagccaccgttgttccgcaaatcatcgacaaccaatatcattatctgatcgtaaaaggcaataacttcgtagccgagttcaacaaacagaacggttacttaagcaaatatgcagtggacggaacggaaatgctgaaagaaggcgcagccctgacccctaacttctggcgtgccccgacagacaatgatatgggagccggcctgcaaaacaaatatgcagcatggaagaacccgggattgaaactgatttccttgaattccaaaacagaaaatgaccagatagtagtgaatgcggaatatgacatgaagaatgtttccgccaaattatatctgacttatgtcatcaacaacgaaggagccatcaaagtgacccaaaagatgacagccgacaagaatgccacagtatctccgatgttccgcttcggtatgcaaatgcagatgcctaagtgttttgaaaccgtagaatattatggtcgtggtccggtagaaaactacagtgaccgcaaccacagcacagacttgggtatttatcgccagagtgtgaatgaacaattctattcctatatccgtccgcaggaaacaggaaccaagaccgatatccgttggtggaagcaactgaatgccggtggtaacggcctgaaggtggtaggtgatgctccattctccgcatctgccttgcattataccatctgttcactggatgatggcgaacaaaaagaccagcgtcactcgcccgaagtacagaaagcagacctgaccaacctgattatcgacaaggctcagatgggattaggttgtgtaaacagctggggagctctgccgttgcctcaatatatgttgccttacggtgattatgaatttactttcatcctgactccggtaaaacatcagattgaaatagaataagacaagaatttaaacgatagaaacagggtggctggatttggttctcagccaccctattctattctctctgttcttcatagctaccgccatctacaatttcctatgcaacaagtgtaacacaagtagctggcctaatcatctcctttcaagatacattttccaccttttttcccttcaaatccttcatacacaaccaatacactgaatatcaaactattacaatgaatcattcttattccaatccttcataaattcttcataaagttatatccgttccctttgcatgaaccaaccacgggaatccattccgacaacccatcgaatctttttccttattttaccgtacccgattacaaacctcggttgtattactcataaagaacaattaaacactagtaaaatgagaccagacggctatttgaaaacagcgtggatcatgaccatattattcagcatcatccttccgcttcattcacaaacaccccggcaattctctatagaattaaaggacaaaccacttcccgctgcccttaaactaatcgaaaaggaaggtggaaagaatattatcttctcctataacgaaactgaaagttaccgggttacagcctccatccggcaaaaaactgaacttgaagccatcggcactgtcctgaacggcactcctttcatttgcaaagaacgggaagaatacttcgtcatacagaaaaagggaaagaatgtacccaccaccgaaatacgaggacaagtaaccaatgaaaagaatgaaccgctgccctactccaatgtactcttattgacccccggcgattccacctttgtaaacggatgtgtcacccgtgaagacggaagtttcctgatgatagcggaagaagggagaccttacttgatacgggtttcttacataggctataagacagaagtgcaaccttaccaccctactcctacgtttcacctgcttcccgacacccaactgatgcaggaagtcaccatcagcgcccgacgccccatgatagaagtgggtcccaacggactaaaagccaacgtggcaggaacttccctggcccgaatggggtctgccgcagaaatgttgccccatcttcctttcgtcaccggccgtaacggcgaatacaatgtaatgggatgtggttctcctgtaatctatataaataataagaaggtacgcgacattacagaactggagcgtatccgagccaacgaaatcttatccgcggaagtcatcaccactcccggagccgaatatgcctcggacgtagcagccgtcatccgcctccacaccatccgtcggcgcggacaagggttgagcggccatttcaatacgacttattcacaaggacattctgccaacgccaacgaatatatggcattaaattatcgcaccggcggtctggatctctttgtaaaaggctatctggcacaacaaaactcgtatggaaaaaccacaaatatgaaccgcatcaagggttccgccatttggcaaaccaacaaaaatgatgtgcaaacccataagagccaacgtttttccggtgagctgggattcaattatgaaccggatgaacaccattctttcggtctgcgctatatgcccgaaaccggaatagggaatgcagacagaaattcatccggtagaaccgtcaccagacgtaacgatgaagaaaccgaccggataaactttactacagcagaacaaacacatacaggttgggatcacgcggcaaacgcctactacgcaggagaactgggcaaatggaatattgacttcaacgccgattatctattcaaacgctcgcattccgaccagaacgccattaataatgacgatgcaaccgtgcaagcagacagtcgtatgcgcagctccctctatgccgccaagctggtagtcagtgcccctttatggaacggacgtttttcattcggtacggaagaaacttttaccaaccgccatgatatctttacccaaaacggtttctctgccgatgccgacgaccacatcaaacaatccgtatatgccgcatttgctgactattcaaaatccatccgccattggaaactgaatatgggaatacgttatgaacatcaacaaacagattattatgaaaaaggaataaagatagatgcacaaagccctacctataatgatattattcctgtattggccgccagttggtcacacaatggcaaaagtttcagcctctcttaccggttaaggaaaaataatcccgactatagtttattgaccaattccatccgctatcgcagcaaatatgagtattctcaaggaaaccctttgctgaaaacacaaaagacgcaccgtttttcggccagtacctcttggaattggctctatttctcagcctatttcagccgtattctcaatatgtataccaatataattatgccatacaaggaagatacacatccgggcgtcctcttatttgccacacagaccattcctacaacccataattacggcattagtctcaacgcctctcccaagctagggtattgggaaccgcaactcaatgtgaatatggcttttttggatatgaatgcgaataaaataggaatcaccgaacgccggaaccaaccccgtttctatatcagtctggacaacaacttcaaccttcccaaaggctggttcttcaatatagaaggatatctctccaccgcttcccggcaaggattttttgtaacgcgcacggaaggacaaatcagtgcacgcttatccaaatcatttttaaatgaaacattaaacatagcacttaccgccaatgacattcttcataccggttactatcatttcaatttatacggcataaacgcttatatggaaaatcggatttgccgcgacttccaacgcttcggcctccaagtatcctataaattcaatgcaaccaagagcaaatataaaggaaccggagccggacaaagcgaaaagaatcgtctgtaaccccagcggagaaaaggaaatttccgtacctttgttcacggaagacaaggaaacatgcagattttattcaggagaagaaaccataaagaagagcacttcgaacgactgttcgcagaaatgtacccacgcctcgtccgctttgctaccaccctgatgaacaatacggaagaagccaaggacatagtaagcgaaaccatggaacaagcctggaaggagttcgaccaactgaaggaaaacacccgtagcgcttggctctatgccgccgtgcgtaacgggtgtctcaaccgtttgaagcatttgaatgtggaacagcaacacatcgaccgcctcaccgaagccacccgtgcggaaatgaatcaaggttatcgtgcacacgaggcactgttgcagcaagcagaaaacatagcccacagtttgcccgaaccgacttgcaccatcttgcgaagctgctattgggagaaaaaaacatatcaacaggtagccgaagaactgggaatcagccccgacaccgtgaaaaaacatatatcaaaagcattgcggactctgcgcgaagcgatgctgggaaaggaggagaaacaatgaaaaaggagttttcaacaaatgaccacatccatccggacagcggaaaggatacccataaccaaagctcccaagaaaacgggacttggaatgaccatcaattggaacagctcttcggtgaagcattgggggatactcccaccgcggacgaaacccggaaagcctggcagacattcatccgtcgtcaccgtatcagacaccaatctatccgccggataatgatactaggtatagccgccgctgtcatcgccttggcacttgtattccagcctttactgcaacctgagcagcaggaagtggaagtcttcacttcactggaagttcctgaggaaattacttttcggaaagaagggaaaaggataattgtaaacaccccacccgctaccattacctccgttcaattaagcgacggaagcaaggtattgctcagcgcaaacagccgtctggagtatcagaaagagtttacagataccattcgcagtgtcaaactaagcggagaagcccgttttgaagtagccaaagacgcttcccgcccctttatagtctgcaccgagcaactacaaacacgagtattgggaacggtgttcgatgtgaaagcctatccccgttactcgccggatgtcatcctctatcaaggacgagtgaatgtaagtcataccaagcgccgtcaaagccgggaaatgcaccctggggaacaaatatccttggataaacaaggaaaactccaattgaaaagagtcgatacggagaagagaaaaggatgggcggagaataaattttcttttgacaataccgacttgaggcaagtcatgcaagaaataggttcatggtataacatcagcatcgtattccgttcacgtccgttgctggacgaacgcatctatttccatatcaaccgccaactcccgatgaataccgtactggatgcgctgaatgatttgaaaatcgcacagttcaccatgaaagaaggaaaaataatagtggaaacaccacaagacaagaaacgataacatcaatgggagttcaataaacaagcctatattttcatctggagattaaaatatcagcgttcttttcatcttcaggtgagaaccattcggtttatccccctgtgctaaagaacctacagcattatctctttttccagtcccctcgtgtgaaatcgggaatctccaccggaacactgccctgccgcacggaacgctcgctcagttccgtaatgcaggaccattcggcggcatcatacacatcctgatccaacggcaaaccgttcctcaaacaatgaataagccgatagtccatgatataattcatttcattcggcatattcttccgccgggcctcttctccgataacagctgtaaaaggatgtttatactgctccatcatccgctcaaactgctcgccggacaaaggctcttttccgtatttatccagcataagacagggaacgggatatttctgcatgaatcccttcgtgccgcacaccgtctgatggcggctgtacgggcgaggagtggtcacatcatattgcaacaagatagttcttccttttgcggtatgaatcagcgtggtattcacatcccccatctcataattctgtgccgcttcttcggaggatgcgccaaacgcctgtccggcataagcagaaagaccggcctgacgcgaggacatggaaaccagatattccatacggtctccccgatgaatattcatccattggcagacaggacccaaaccgtgagtaggataaggattccccgtatgctgctgactataaagctttatccagtgattgtgatacccacccgccttttcatctgcaaaataatgcttgcgcaagtcatgtatgtatgccccctcggcatgagtgatctctcccaacaccccctgctgcaccatgttcaatgtagtcaaggcaaacgcatcgtaacaacagttctccagcatcatgcaatgacggcgggtttcttcggctgtatccaccaaacgccagcaatcggccacactcgtggcggcaggaacctccaaagcgacatggcgtccctgctgcaaagcataaaccgcaatctcggtatgagtcagccagtctgtacaaatataaacaagatctatctctttacattcgcacatcctgcgccacatcccctcttccgaatagttctcagccttggggcggccggactcctgcaaaatccgctctgcacgctctatgttttccttccgcaaatcacaaagcgctttcacctcaatgccttccaggtgcatatatctctcgagtgcaagaatgcccctgtttcctaatccgacaaaaccgatccgaactacggggatggcagggcaggttaaattaagtacgttgggtcgtttcatggactgctttatttttctgacaaagataaagagaaaattcgagaatgggagcggattggagcaagaaggtcgtaaacaagggatttagagagaatcgaattgcgatatcgaagccaaaccgaagccatcgaaaagccaactgaaaccgggtgacaactatgttaccgccgagaaagttcgcaatgcctatttaggtttgggcatgaaccacgagacgcaggtcggtaaactcaaaagtctgcgcagctattggaaatactgcgtcgtttacaaacacctcgcggaattcgtcgaaaagcggtacaaggccagcgatattgcgctgaaagagcttactccggcattcatcaccgacttcgagttgttcctcaaagtggaaaagaaccactgcaataacacgatctggtcgtatacagaggaataaaaatttaaataaaaaacagccgtataaaacggctgttcttatttgtatcttgaacaaatatcttgttgtttagcggacagatatatttttcctatactctgacggtgttatcttcatcctcttttgcacataccgactgaaataagaaacagaggagaaattcattcgttcggcaatcgtagttaaagacaactctttttgtcgcagcaagcgagtaatctcttgaagagtaaaacggtcaatccaataagtggcaggtttgccgcttacctttttacatatctccgacagataatgaggtgttatgcaaagccgggatgcataaaaatcgagatctcgatttcgaatatattcgccgttatataacagttctatgaaatttcgcagtaagaccgtaatacgttccgatacctgcatggtattctgactgcgtgcatgaatatcataaaggtcgaggatgtgcgccgtaagcaggcttcccatcaattcttcccaaaacagatgctctttatctttcagacgttgccggatacagcgcattgcctgctcgcatacttgaaaatcatgagaggaaagtttcatgaccggattctgcaagagtgatagatacccaataatgccgtaattgctgcgaatagcaatcgaggaaacgaacgcatccgaaaggttcatcaggataccttgaaagtcttcggagtccgaaaattccgatacgagtgtggcgttgggcagaattacataatccccggccgcgatgttataacgggtatcctgaaacgtgaaacccatatttcctccgctgcaaagaatatggattactcttcctgcatatcgtaaagcattaaattcctgcaatgtatcagcaaaaataatcccgtcgaagtctgtatgtgtcatttctctttcatttcctgcaaaaataacgaaaaaccacgaatagtgaaaattcttccccgaataatgaaacaataaaatgataggtaccctgtaactttgcatcagaattaaaaaccataaaggatatgaaaaatgtaagattaaacaatggagtaatgatgcctgctatcgggttcggtgtctttcagattcctgaaaatgaaacggaacgagccgtaaatgatgctatcgagatcggttatcggaaattcgatacggccgctgcttatttcaacgaggaacagttgggaaatgccatccggcaaagcggtatcaaacgggaggaattcttcataaccaccaaattgtgggtgcaggactacgagtacgacgatgccctgcgggctttcgacctctcgatgaaaaagctcgggttggactatcttgacctctatttgatgcacaaaccgtacgggaattactatgccgcatggcgggcgatggagcggctctataaagagggacgcatccgggctatcggggttacgagtttctctaatgaacgcctgcaagaccttttcttgcataacgaaataaaacccgtcgtaaaccagcttgaaacgcatccgtttttccagcagcaggctgccaatgctttcttacagcaggaaggcatccagcacgaagcatgggcgccttttgctgaagggcagaatgacatattcaatcatcctacattgaaagcgatagcagagcaacacggtaagggcgtcggagctattattcttcgttggctgaaccagcgtaacatcgtggttatcccgaaatccgtacataaggaacggatgatcgagaacttcaatattctcgattttacgctgtccaaagaggaaatggatgccatcgccctgctggagacagggaaaagtcctatctacgatgacatggatttacttacggtaaaaggtatcgggttgcacaaaatccatgaatgatttcaaaaaacaaatagaatattaacccttaaaacagaatcatatgcagactgtaaaattgaacaacggcatcgaaatgccggtattaggatatggtgtatttcaagtatcgcccgaagagtgcgagcgttgcgtactcgatgccatcggcgcgggttatcggttgatagacacggcgcaggcttattataacgaagagggcgtgggtaatgccgtcgccagatgcggcgtgttccgtgatgaactttttctcacgaccaaagtgtggattaccaatgccggagaggaaaaggcaacccgcagcatcgacgaatcgctccgtaagttgcgcaccgattacatcgacctgctgcttatccatcagccgtttagcgactatccgggaacatggcgggcgatggagaaagcggtaaaggccggaaaagtccgtgccattgggctatcgaatttctatcccgaccgcttcgtggatatggccgaatgtgccgaaataaaacctgccgtaaaccaactaaaaaccaatgtattcagtcagcagtgggatgctgaagctgaaatgaagccctatgatacacgtatcatggcttgggccccactggcacaaggcgatcccgaccttctgaccaatcccatactgacggctttggccgaacgatacaataaaacggtacagcaagtcgccctgcgttacttggtgcaacgcggcatcatcgccatcccgaaaagcacgcatatcgagcgaatgaaacaaaatctggatgtattcgatttcacacttacaccggaagatatggaaagtatccgtccgctcgacaaacctgccgacttccgctggtcgcaccgtaatcccgaactcgtaaaattccttctgaattacgacaagcaatttaaccctaataacaaataataacccatgtataagtcattgaacaacaaagtcgctcttgtaaccggagccgggacgggcatcggaagagctattgcccaacgtctggccgatgaaggtgctaacgtattgattgtaggccgcacggaaacgacacttgtcgaaacggctgcttacagtgataaaatctcctatcttgccatcgacctcgaatcggaagacgggatacgcactatcatccgtactgtcggagaacggtacggtcgtctcgacattcttgtcaataatgccggatgggcacccgtcaccccgtttgcaacgatgaaaatcgacgaatacgacaaggtattcgccatcaacgtgcgtgccgttgtcatgctgacacaagccttcctgccgatgataaaggcagcaaaaggcaatatcctgaatgtcacgacaactatgacaaccaatcctatcgcgacgatggcgaactatgccgcctcgaaagctgccgtctataccatgacacgtgcatgggcgaaagagttggcaaaagacggcgtgcgtgtcaattcactcggcgtggggcccatcgaaacccctatttacggcaagaccgagctttcggacgaggccgcgaaagcccacaaggatatggtaacgaagagcgtgcctctcggtagaatgggacagcccgaagaggttgccgccgtcgtcgctttcctgacgagcgacgaagccagcttcgtaaccggagccgactataaagtggacggtggtgtaggtgcataaaacaaataacaataaaaagaatgaatatgaaaaatgtattgattatcagcggccatacaaaccttgccgcatctgtagccaataaaacgattctcgaaaccctgaacgaacggctgccggaagccgaaatcgtaaagctggatgaactctatcccgatttcaaaatcgacgtggaagccgaacagcagaaattgctccgggcagacatcatcgtattgcagttcccccttttctggtactccgcaccctccatattggaacgctggatggaagagactttccgtcacggattctcgcacggaagtaccggagacaaactcaaaggcaagaaactcgttctctctttcacaacgggagcacccgaagcattgtatagccacaagggggcgatgggctacaccatagacgaatttttagcttgctacaaagcaacctgccgactgacgcacatggagtatagcggcagtgtttatacctgcggcgtaagttacggcaaccgtaccacaccggaacttatcgagcaacaaagaaatatatcagtagcgcacaccgaacgtcttatcgaattactcgaaacgctctaatgcttgaagacagactacataatttcgatgatatagtattcagttgcttcctacccgatgactggctgaataaatttcgtatgccgcaacacgtactcgtgtatgtttatgctggttttctactttgatggcctgatgctgttcgctttataaaaaataaatctccaccgagttccacttaaacaaactcgaagaaactgatttatttacttataaaacgaacatttatgatacatcataccatgcggatcgtttggtggaatccgccactcaagccgtcacggaagaactgttccgcgacttcggcaatacactccgcatcctctgcgacgaagacgttcaacagtaaacataagcctttttatccatacaactaaggtctttattcctattatcttctatagtcttccggtgcagaccgtacagtccactgtagcagaccgtacagtccattacggcagactctacagtccattacaatggactgtagaaggtttcagtataaaagcccttaagcatctggaagaaaacacttagccaaagagaagatggcacttaagaaccgctttataaccagacagttcccttttccgggaaaaaacaaagaggatgtgtccgggccgaagtgacagccacaggacacatcctctgttttctaatgagaacagtacaaactgtgcttaaataatagaagtacgcttggtaaattctattatttcaggaatataaccgaatgccagaccggtcaccgtatcggcacaaccataataaacggctacccgtcccgttgccggatcatgcaaagccgcacaagggaagcatacattgggcacatcacccatacattcgtaaggttcacgcggagagaggagataaggtcccgaacggaacttcaccttccaaggctcgtccaaatcaagcaatgccgatccaaaggcatagacataaccattgcaggaacgaagcacaccgtggtagaacaacaaccagccttcactggtttcgataggaataggaccggcacctattttcaagcactgccatgcactctgttcaaaaggcgcaggcgacatgacatgccgatggcgtccccaaaactccaagtcgggcgactcgctataataaatatctccgaaaggagtatgcccgttgtcactgggacggctcaacatggcaaaattaccattaatcttgcgagggaacagcacgccattacggttgaaaggcaggaaagcattctccacctggtggaacgtcttgaaatccgtagtccatgccacgccgatggtgggctggcccttatatccgttacaccaagtcacatagtaacggtcatcgataaagcagacacgcgggtcataaccatacacccattcacctatctcgggaatatcacactggaactgcaacttctccggattgatgtcccaatgaacggcatccttgctgaatcccacatgaagcgccatccggcggtttgtatcatcacaacggaacactccggcatacccttcgccgaaaggtactaccgcactattgaatatactattggatgtaggcagcaaatcacggggaatgataggattcgcactacatctccacattacatttttacaaccttcgggacgctcctcccacggcataccgggcaacggattgcccgcaatcttcaattcactcatattctcttttttgttaggttaatagtttttctctatttcttgtcttcgtgtgtgaagggtacaaaccaggtcatcagaaaggccggaatggtagccaccagcacaaagatgaaaaacagtttatagcccagccagtcgctgacatatccggacatcataccgggcaacatgacacccagattcatgatacccgatgcaaaagcataatgcgccatctgatgaggaccggcagccacttgctgcatcatgaacaaggtaagccccacaaagccgaaaccatatccgaaatactccagcacaatggcccctccgataaggggcgcactctgcggttggaaaatggcaagcagcgtgtaagccataaaaggcagattgaacacacaacacaaggagaacaaagtctttttcaatccacgtgcggaaatataatatccacctagcaatgaaccgagtacgaaagctgccgctccgaaggttccataataaataccaatctcctgttctgtcaatcccaagccacccacatcacgaccggctttcaggaacaaaggtacaattttcatcacaaacccttcggcaaaacgatataaaataataaagcaaatatagtaaacaatatgctttttcgtaaagaagttccggatgacattccataactcggtcatactctgcgaaaaagaggtgaccgaatgggcgtgcttgcccgaaggtaacatacgggtatgataaattcccaaggcgaacatcactactccgaggataatcataatgaccgtccaggaataaagtaccgcatcttctgcaggcccttcgtattcatctttcagaaaaccggccagatagaccagcaagcctgtaccgataatcttcgccacattataaaaagctccctgccaacctatatatttagcttgttcctgcgcattcaactcgtccatatatactccgtcacaggccacatcgtgcgttgctccgctaaaagcgacaatagcgaacaaggcaatagtgaccgcaaaaaaagacggaagatgaagcgacaaagcgatcaacccgaaagtaactcccgacaccatctgagtgaggacaacaaagaatttcttggtacggtacatctccagcaacggactccaaaggggtttcagtgtccaaggaagcatgataagggaagtccagaaggctattttcgcatcactgactcccagacctttgtacatcagtacggctaccatattgaggacaacaaaagggagccccataccaaaataagcggtgggaacccagaaaataggactacggcgtctggacggagttggggtttcggttgttttcatttatatctaagttttaaggttgttgaattcggctataaccgaagataacttcatctccttctgagaggggatgaagttacctttcggaatctattaatgcaataggacgaagcatttggtaaatcagtcagttacaggaataaagcttaccgcttgtccaccaccttttgccatgactacagacaaggtatcggctgctgtcacctctctgtccttaatctgataagaagtaggatttgttttccagtcggcatcttctccatcagcataaatcaccgcatggtattttttatctttttcaagaaaatccaaaggaatggtcagcgtacgtgcttcctcattggtcgtggctcctaaaaaataattatctttcgctttccgtactacggctacaaactctcccggttcgccctgcaaggcttcagaccagtcacagtccgcatcaaaatcccggaagaactggaaagcaggatgcccttcataattctcaatcatatccgatgccatttgcaatggagaataaatgattacccaattggcaatctgctttgccaaggtggtattcacacggctgtttcctttatccaagtcattccatttcttgcgacggggagaattgcgtgtcttttcataaagaatatcaaaagtacccggcgtataatccatcggaccgcccagcaagcgggtaaacggcaataactcgtgatgctcgggaggattaccttcactccatccgttccactccataccgcgggcgccttcccgtgtcatcatattggggtaagtacgacgaattcctgtatctttgataggttcgtgggcattaacggttgtatgataaccggcggcagtctgcaccaccttgcggtaatggcgtacattgaactgtccatgatggctatgaccgcccggcagtcctccggcataaccggtcttcacgctgtgcactcccaagtcggcataccatttgtaagcattgtccaactggcgttcgtaattaaagatattgccacctgtttcgtggtgaccgattatttcaatccctttctccttggcataacgtgccacctctgccatatcaaaatcggcgtagggtttggtatagtcaaaagtctgcataccgccccaactttcccagccttcattccatccctcgaacattaccgcttctatgttattggcagcagcaaagtctatataacgtttggcattagcggtggtggcgccgtggcgttcatccatcgtccacgtttcgactcccagatgcattccccaccagatacctacgtatttcataggacgtatccagctcaaatccccctccagcaaacaaggctcattcagattcagtatcaggccggagtttatcagacctaccgctttgggagctatctgaatactgcgccacggagtcacgaaagtccctccggcaaaacgggctttcaccccatcgggccaggaagccagttccgatttgaagtgacaaccttcggtatgcttcaaagtcatttcggggaaatcggtcaaagctgcttcgtggatactggcatataccccgttatctgttttgaaagtcatcggggtattggcattatccaccttgctgacgggcagggtgcgatacagcaattcgtaggtttcaaaactggcgggaatagaccatgacttgccgtcttgtgccaaattaaatgaagtgagctcatccattacgaacacactgtccacttggggtacttgatattcatagcggaagcccaggccgtcatcgaacacgcggaaacggagggtcagctgtgtatttgcctggtctttcaaacgcacggccatttcgttataatggttccggattgatttattttctccccaaggttgggtccaagtttcatcctttgtggtgtactcggtactttctatcagaaaacctttggaaagatttaccccgtcacggccttcaaagcccataacggagggggtgatgaatggattccctcctacagaaactccgtaggtcatctctcccgcttcattgagattgaatactaattttatattgccatccggcgatgtcaattctgtggggcgagaacacccacaaaacacgactaacaaaaataatacatagtaactgtatgccttcataatattaaattggattaatgatacaaatataaaacaattaaataaggtattacacttatcgaaggaggaaaattattttaaatgggagagggaatgataagcttatttgtactgacagcattaattttgtacttttgtcacatataacaacaaagtgcaaatgaatataaatcagaattatagagaagcagtaaaggccataaaagaagctatcttacgaagccagtaccgtgcagccgcatcagtaaataaggaacaattatctctttattacggcatcgggcgttacgtgtcggaaaattcccgtacaggcttttgggggaaaggtgccattgaacaaatatcttctctgttacaaaaagaattgccggggctgaggggattttcagcaacaagcataagaaatatgcgtattttttatgaagagtgggataaagttttaaatcatccgccattggctgatgatttggtgttgaatgaaaaattgcttcttgtagcaattcatcagccagtggcggatgaatttaattggtcagacttcttttcaatcggctttagtcaccataccgaaataatatccaaagccaagactttagaagcaagactattttatatacatgagtgcgccattcgctattggagtaaatacacgttaagggattacttaaaagcagatctatacagccatcggggaactttacccaacaattttgcacaaacattgcctgatactaagcaagcgctaaaagttgtttgttcattcaaagatgaatacttgcttgatttcatcaatgtggaggaactgaaagcaggaagaggacttagacgaaaaaatagtagaaaaggcaattgttgccaatgtgaagaaatttattatgaccttcggacaagatttcagctttataggcaatcaatatcgcatggaagttgcaggagaagaaatgtttattgatttgctctttttcaatcgggagcttaactccttagtcgcagttgagcttaaatccggaaaattccgcacttcttatttggggcagttgaatacttatctatccgctttagatacatatatcagaaaaccgcacgaaaacccttctatcggaataattctttgcaaagaaatgaaccaaacctttgtagagtttgccgttcgtgattataacaagccgatgggagttgccacttaccgtgcatctaaagatatgccggaacgacttcgtaacgctctgccaaacattgaagatttgaaaaagttattgtaatacaaacgccgataaagcccttttaaagactctaccggcgtaagttcacctattaaaaaaatcagaattccaagtcagccaactgaggattatgatcggaaagcaaagcttccggtacttcagccggtatctcacagttctttaccagaacttgcggagtgacaaagatgaaatcaatcttttcacaatcctcggccggaatacgggcaaaatcatgaaaagtataatcaacgccggtcacacgggcagccgtcttataagcatccttcatcacaaactcgttggtagtaatcgtttcgtatgcatcgctcgcatcggtcacattaaagtcacccgtaaccactgcggggcgttcgcctacgatctcttttatcttacggataatgagcaatgcgctttgacggcgagcctcttcacctacatggtcaaaatgagtattgacagccatgaatatctttccggtggccttgtctttaaatttcgcccaagtggcgatacggacacaaaccgcatcccatcccatcattcctacgctatcgggattttcggccaaccagaaagtattggagtccaacacctcatatttgtccttacgatagaatagcggcgcatattcacctgctgtcttcccgtcatcacgtcccacgccgataccatcgtattcgggcaagcctgcacgaagatcctgaaattggttatgcaaaacttcctgcataccgacaatatccagttcacggtccttaataaactggcacacacggtctttccgatattgccaattgttcaaactgtcttgcggattgtcataacggacattaaaagtagcccaacgaacgtcggtcttcttctcttccgcacagccgcccaataacaggacggctgccaataaaaccttaattccgcaacactattacaaatataactttttaagtacctgagcaacaaaaagttgctcaggaatttgccatgtcagatttttcacctatcttagtgttgcaaatcaaaatatgtatcaaacccgacagacatggcaaaggtagcaattaaatccgagaaactcactccttttggaggaatattttcaataatggagcaatttgactccagactctcatctgtaatcgactcaaccctcggtatgagatgcaggctgtatggttatcaatacagcgaaatcatccgttcgcttatgagcgtttatttttgtggcggctcatgcatcgaggatgtcaccactcatctgatgtaccacctttcgcttcatccgacacttcgcacatgcagtgccgacacgattcttagagccataaaggaactgacccaggataacatttcctacacatccgacactggcaagacctacgacttcaacacggcagacaagctgaatacactgctcctcaattgcctattgtccacagggcagctgaaagagggcgaggggtatgacgttgacttcgaccaccagttcatagaggctgagaagtttgatgcgaagcctacatacaagaagttccttggttatcgccctggcgtggcggttattggcaacttgattgtcggcattgagaacagcgacggcaacacaaatgtccgtttccaccagaaggacacgctgaagaggttctttgaaaggtttgaacaaaacaagcttattatcaaccgtttcagagctgattgcggctcgtgttctgaagagatagtggaagagattgctaaacactgcaagaccttctatatccgtgctaaccgatgcagttcgctctacaatgacatctttgccctcagaggttggaagaaagtggaattgggcggcattgagtttgagctggcctccattctcatcgagaaatggaaagggaaggcataccgtcttgtgattcaaagacagaagcggatagacggcgaactcgacctgtgggaaggagaatacacctaccgctgcatccttacaaatgactacgagtcttccgagaaagagattgtcgaattctataacctccgtggagggaaggaacgcatcttcgatgatatgaataacggattcggctggaacaggcttccaaaatcctttatgggagaaaacacggtgtttcttctgcttatggcactcatacgcaacttctataaattcatcatggcgaggcttgacgtgaagaggttcggactcaaagcaacaagccgcatcaagacgtttgtctttaagttcatctctgtgccagccaaatgggtcaggacatcaaggaagtatgtgctgaatatctattcatgcaacaatgcttatgccaatgtgttccagaatgactttggataacaccgacaacttatagtcgtgattttgcgtattgcctcaagtcgcatggtggggtaaggggcatttatatgtctttatggtgacattcgatgcactgtgccccctttttactaacgatgcagattcttttcgcttctgtatcatattaggcgcgtagttgcggatttgaggtaaaaatagaatttgcttcattttgtttctttttatgttccctaggatacaaagatagcaatttctatcggaaattattcggagtatgccactgacctttatcattcatcgtatcggccacatcccaccatacacggctaccctggttcacattgcccggtttattagggttacgggactcgctgttaggatagttgatgcgtttgataagcttgccggacgccacttctccattggaattgtttccattaaccggagccagcagataacgcggatagtcggtacgacgcacttctgcccatccttcatttccattcgggaaaacggcaatccacttctgagtaataatctgttccaattgttcttcctcgctaccaccggcaaatgcttttacgccatccagatgactgatgtattcattggccttgtccgcatcaattccataataatccatagatgccttgatacctttcaaataaagagcttcagcagtttcatccaccaatgacggccagcgcaatgctgcttctgctttcaggaacaaactttcagaataccccatccagactatttcacgggccagattccaccaataatccttgttcatggcatcagatgacagaatacaacggttggcagagtatctgttcagataagagccgcctacattggtttctccattcatcaccccgttgaaatctctcttcagattctctgtgggaagcggactggtagtcaacgaatcaaacggagtaggacggaaccataaaacttcacaacgagggtcgagataacaattctcagaattctcattgaaagtaacggcatcggctgccgcaccttctttcaaggcctgattcttataagcccgttccatttctttcgacaatacagcattgccggtccagctgaacaacaatgcgtatatattttcattaccgccggcgatatactgacgttttggagtctgcttcatattgtcatcctggctttgcatcagaccggccggatctgtcaaagctgcttttgcctgagtctgggccaattccggatttacattggatacacgcaaagcaaggcgcaaacgcagtgtgttggcaaaacgacgccatttgtccacatcacctccatagcatttgtcattgtcacctaaatcatactgactgacagcaggaagattttcctggtgcaactctgttatagcctgatccaacagctggaaaaggatattatagacctctttctgaggcgtataagacacattttcttccggcggtatagctcccttcacataataagcgacgggaatatctccgtaagtatctgtctgcatggacaacaagaaagcataataaatgcgggtaatatagaatgccgtatgataataatccttattacagaaatagaatgtcttgaccaactgactgtattccgaagtgctgcggtcatcatagaaatgcttccatcggctggccgaccatccatccgtataagaataggtaggcgcctgattcacaaagccgctgacattgtttccccaataaccggcatagatatcatgagtcagattggtcgttgtctgataatcattgtaaagaccttcgtaggtgaaattggcaaaaatacttccgatagcgccttccatccctttcaaacttgccatggcattgtctgtcaaggtgtaatcaatgtctattccatcggccgatacattctccacagtcgggtcgtaaatcggtgcgtaaggatttgtattcaattcctcaaaatcatggcatccggccagagccagcaatgagcataaggctacggatttatataatttgattttcataatcagtttttccttttaattaattagaaacctaagttgatagaaataccgaaagtacgtgtaaacggcaacgatgcatagtcaatggcttgtgagaacatcgtagtgtcatagccgccttcggggcttgtacccggcgtgtgcttcatcagataacacaagttacgtgctacaaatgaaacattcagcgagttgacaggagtcttcttcagcatagatgaagggaatgaatagccgattgacaattctttcagtttaatgaatgaagcatcgtagatgaaatcctcagcctgcaatgagccgtagtattctgaggcggaaacctgttttgtattcacctcgcctgattctgtcacaccggggaataccatcatatagttgttttcctcaccacggttcaaggtacgcttagccaaaccgtttccggtagccagcatctcggaataagagaagatatcaccaccgaatttcatatcaaacagtgcagacagtgtaatccctttataagtaaaggtaggagatacagacatggtcagcttaggctggatattaccgataggtttgttcacatattcagactcattggtcacagtcatgggcaaaccattttcatttacgataatatcaccgttttcattgcgcttataaagcgatgtagcataaatctcgcctaatttgtgtccggcgcgtgtacctacttttacagggaagtttccatcaccgttaaagaacatatagttcacattttcttccggagccagttctttcactttcgatacgttgtgagccatattcacattcaaatcaaaagcgaaatcctttgtttctaccagagtggaatacaacataaattctacaccttgattggttaccatacctgcgtttacccattggccaccactccagggagctgctgcgggcactttcataatctggttctttgttttgctgtaatagtaagtaaagtcaaagcccagacggttgttcaagaacttcatgtccagacctgcttcataagaggtcgcgatttcaggcttcaactgatcgttcatcttcacattatccttggtcggagtcaatacaccattatcgaatttgaaagagtaggtgttgtataactgataagggcttgtgtccttacctacctgtgcggcagacagacgtgccttgggtgcgacatgaagtcgcatagataattgttggaatgatacttacgggtatcagctttaacccgctgttccgtcagcggtagcctaccaccgatgcaccttaatagttgtattaagcggttgggacaaagtacactttcgcaagacaagacagaaccgtgaggggaagtcaagtacggttagtatcataccgtagagtggcgaggcaggatagtatggttagcgcaagcgaactgttagtaaacttcgtaatgtcacgaaagagtgtaagatactggtacactctacccaaaagggaagcggtcggttaatcctttccatggtaggattacacggatataagcaccgccggaggatgagacagaacctaacctatccgttagttatctatgtggaacatggtaagcctgtatatctcctgccatgtaaaaatggcaggtaagctgacagcaatgaaagccgaatggtgtgcaggtataagataacagaaaaagcgaatgccgttctgtaatggaacggatacggattgaaccgacatcacgggctgatgtaggcgacatcatccgacacgaaagtgggcagacttctgtggcgacactcggtaggcaaaacaaaccgaatgttgccaaatggtgattctttacaatagacttttagaacttttttaaagtaggaatgcaaatgaacgataaaatcaaagaaaaactcctcgaccaatcgtgtgcaccgactgataacttgcaaacgaattgggacaggatagactggaccaaagcggagcaggctgttaagaagcttcaagctcgcattgtaaaggctcagaaggaaggcagaacgggcaaggtgaaagccttgcagtggacgctgacccactctttttacgcaaaagccttagccgtaaagagagttacttctaacggaggtggtagcacccccggggtggacatggaaacatgggagaaacccgaagcaaaaacacaagcgataagtgagctcaaacgcagaggctacctgccgaagccattgagaagagtccacatcaaaaagagtaatggcaaactgcgaccgttgggaataccgacaatgaaagacagagccatgcaagcactttacctcatggcattggaaccagtgtcggaaacaacagccgacacacgttcgtacggtttccgcaaggaacgtcgctgtatggatgcggtacagcaatgtcataacattctccggaaaggctattctcccgaatggattttggagggtgacataaaggggtgcttcgaccatatcagccatgaatggttgcttgccaacatccctatggacaaagcaatactccgaaaatggttgaaatgcggctatatcttcaacaaacagatgttcccgacagaggagggaacgccacaaggtggcattatctctcccacgcttgccaatatgacattggacggattgcagaaagtccttgcagagaaatataaacgagttagaataaaaggcaagttatattcgccaatggtgaatcttgtccgctatgctgatgactttataattacctgcgagaaccgtgaaacacttgaaaaagaaatcaagccattggtagccgactttatgtctgaaagaggtttgaccttatccgaagaaaagacggtgataaccaacattcgtgacggtttcgatttcctcggtttcaatattcgcaaatacggcaatgaaatattgacaaagccgaccaagaaagccgaaaaacgctttatggaaaatatccgtaaggttacaaaaggtcataagggttgcaagcaggaatcattaatcagaatgttgaatgctaaaatccgaggatggggagcatattatcagcatggggcgacacgtgattcttttcacagaatcgaccatcagatatttctcgccttgtggcaatgggctaaacgccgccattccaagaaaggaaaacggtggataaaagaccgttattggcacaatatccgagggaacagctggacttttgcggctaagttcaagaaatcaaacggcaaggaagaccaactcactttgctgaaactggcatcttcgtttcctttcctgcaatatacgcagataaaaggggatatgaatccgtttgacgcagactgccgcctgtacttcaataaaagaatgaagtcaaagatgcttgtgacactgaaaggacgtaagtccctgctttacctatgggaaaagcaagggcggaaatgtccgatatgtggtgaaccgattgacacgtataaggcatggaacgtaatgccaaccgtccaagacggacggaaatgcaatctgttggttcatgatgaatgtttcaaattatcccgtaaaaacaatggaaacaagaagtaggatgagccggtctctgcacacgaacagagactttgaaaagcttgagccgtatgaggggaaaccctcacgtacggttctgaggggggaagagggcagtaatgcccttgacctacccgatcaaatgtcacccagcttggcaacggtttgtcgatggagcgcaaaaagtcggaaactacgaaactgaggttggcagacggatagaagaaagaattgttacctgacggaagagtggatgaccagtcgttacgagctgtcaaatccaaagacagatattccttccatgccatctgcacagagccgaacactgagttcatggcacgcttgtaaccatcctcactaccggttctcagcaaattggccgcattcagcatccaattacctttatccaccatattacctacgcccacacccaaagtttccgaacgctggtacataaagttaccaccgacattgaagcccagacggaagttatcagtcaactgacggtcacccatcaaaatgacttcagcatttgactcgaagaagttttcttcactacggtccattgagtcattcgtaatcatggaagtattggcttctccattgataccatcacccgcattggtgctttgcactctggtgcggtagtagtcaaaagcgtatttggcagacagatgcagccaatctgtgaaattgattttcatgctataatatccgaaagcacgccagcgttcatctgaattctgacgctgatgcaatacataataaggattacggatactggcagtaggtcctgtccagttcacatgcgcatgagtttcatcagaatattgtttcaagtcatccagacggacgttgttagggattctcatcaactgggaaatagcaccgtaatcaccatacagtggacggttatcggcttttgtacgtgaaagagaaatctttccgtccatagacacccatttgttcaattccgttcctgcattcaggtcggcattcacacggctcaaactttcagtggggaatacaccgtcattatctgagtatccgaaagaagtacggaaatgtgatttctctgtaccgttgctgatagatacgttatgcgtatgcgagaaaccggtatcaaaataatctttcaacttatccccatagttagagtaagcgtaagtttctccgttccaagcctctttcatgcttccatccaataccgggccccagcttccgctatccgttttgtcatacaccgcagtcttggcatcttttgtatcaatatgtccttgtccgtaacggcgttgcatatccaatgtctcgccgatagctgtccaagtgaagttaccactataacggattccgaaaccatctttcttactgcctttctttgtcgtaatcaagataacgccattacctgcacgcgaaccgtaaagagcagccgcattcggacctttcaataccgaaatgctctcgatgtcatccggattaatgtccatggaagcgctaccacggtccacaccaccataacgagatgcgtcggatgtagtgttgtcgctgaaaggaacgccatccacaatccataacggctggttgttatcggtaagagaagagttaccacgaatggtgattttcgtagaaccacctaaacctgtagccgaagtattcatctgaagacctgccaccttaccttgcaaggcactggtcacagacgggtcacctgtcttgttcagttcatcacttttcagttcctgaaccgcataacccaacatcttcttctcacgtttgatccccaaagcggttaccaccacttcgccaatctgctgtgtgtcttcctgcatggttacgttcagtacattcttgccatcgggcttcaacgtttccgaacggtaaccaatgtatgagaacacaatctcgccatttccgggaaccgacaaagaatagttaccttcaaagtcagtaatcgtaccggctgtagggtttcctttcacttgtacgtttacaccaatcaaggcctctcctgtcgcatcaaccactgttccggtcactgtatgctcctgtcctgtctgttgagatgtctgaggttctccgggtgctgatagatagacaatattatcctctatcttgtaggtgattcccttgccttgcaaagctgcatcaagtacagactgcaatgaaccgttctttacatcaatggcattcaccggcgtttcagccagtttgtcatcatagaaaaactgatagttagactgtgatttgatgttcttgattaccgctccaagagttgtcttgggagttgaaagaacaatttgtgcgcgggtccattgcatgggtgcagccacaaacaaaagaatcaaaagcgccctgagtaatttgggctttctcattaattgattgcctttcataatttattaaattagttaacactgacttatttttctccagtgaaggggttctcatgcccctttcgagaataaaaacaggcagctaaaagaaaacacttactccatctcgttcttttttctaaattttctagaaaaaacagaggaaaggcaaaagtagtgatatcatcggactttgacgtatagaagaaatatttaaaaacaaaaaggggatgtactcttgtaatgctgccaaaagagaacatccccctccaacctctctttacaagagagaaatgcatggtgaaacttttatttcattgtttcgtcttttgaaaatgaataaggcaaatcactttcttgtgttccacgttgcatattcggacggtcggtcatcttgaaatcgataacaccaccttgtaacaattcattgtgtttcaaataattcttggtataaacagtaccgtttacacgcatttcatctacatatcggttggtatcgctgttatccggtgcggttattaccaagttctttccgttttcaaaatgcagtgtcgctttcttgaacaacggagcacccagaatatattcatctgtaccgggacataccggatagaatcctaatgcagagaatacataccatgccgaagtctgtccattatcctcgtcaccgcaatatccgtcaggtccggctgtatacatacggttcatcacctcacgcaaccaatattgggctttccaaggctgacccgcataatcatacatataaatcatgtgctgaatgggctggtttccatgtgcatagttacccatattcataactgtcatttcacggatttcatgaatcacctgtccataatagctatcatcaaagatagggggaaccgaaaagacagaatcaagcatggtaacgaacatttccttacctcccatcaagtcaatcaagccttggggatcatggaatacagaccaagaatagtgccagctgtttccttccgtaaagtcacctccccacttcaacggtgagaatttaggagcgaatttgccgtccttctgcttgccgcgcatcagcttgctttccgaatcaaacaggttcttgtaattcatggcacgcttggcaaagagtgcgatttccttcttcggacgtttcaattctttcgccagctgataaatacaccagtcatcgtatgcatattccaatgtacgggctgcattctcatgaatcttcacatcacaaggcacatagcccagcttgttataatattcatatcccagacgtccggtagaagaaacttcaggatgtacagcttccgttccatgaatcagtcctttgtataatgtttccacatcttccacacgtactcctttcagataagcatcgaccaagatagaagctgaattattgccgaccatgcaaccacgatgaccggggctggcccattcggggaaaaagccgctttccttataagtattaatcaaaccttcctgtatttcctgatttaccgaaggatacatcaggttcaagaaagggaacaagcaacggaatgtatcccagaatcctgtatccgtatacatatatcccggcaatgtttccccattgtaaggactgtaatgaacaggctgcccattggcatccagttcatagaatttacgcgggaacaacaaggaacggtacaagcaggaatagaaagtacggtattgatccaatgttccaccttccacttctactttacctaagacctcattccaggcatctttacctttctgtaccaatacttcaaaactgtctccacccaattccttcagattctgaattgcttgttcaggactgatgaatgaagaagcgacacgggcatgaactacttcgcctttctttgtcttgaaaccgataacggctccggtatggaaatcagtctgctccagtttaccttctttcaaggttacaggaacactgccgtccggtttttcaggctgtacatcgttagagaacgtagcctcataagtaaacggcttatcaaactcaataacgaaataattcttgaagttggcaggaacaccaccactgttgcgagtggtatagcccacaattttgttttctccgggaatcaccttgatagatgagccacgatcaaaagcatcaaccactacgtatgagtcattttcaggaaaagtaaagcggaacataacggcacgttccgtaggaaccatttcagtcaccacatcatgttctgccaaataaaccttataataataaggttttgcaatttcagctttatgagagaaccaacttgcacgcttgtcttcctcaaattccggttttccagttacgggcatgatggaaaattgaccatagtcattaatccacggactgggctgatgggtttgtttgaaaccacggattttattagccgtatagacatactgccatccgtcccccatctttcctgtctggggagtccagaaattcataccccatggacgggatatggcaggataagtatttcctgtagagagttcaaaggaagactgtgtacctaccaacggactcacatagtctgcataatcctttgcctgcacaaacagtgtaacacacaggactgcaactgatagaaataattttttcatgatattgttatttgggttaagttatactttttaattctttatctgttttccccattccgtcggtacggagctcatggtaatctccatcgttcccccacgtactatgtcattatgggtaaagaaaggaacatccagtggttttccgttcaacagaaccgactcaatgtacttattggtcttcgagttgttgtgggtacggataacgaaagtcttgcggtcgggcagattaatcgtcacctcctcaaacaacggacgtccgatagaataaaccggcttgccgggacatacctgatagaagcccatggagttcaaaatataccatgcagacatctgaccgcaatcttcattacccgacaagccgtcaggagcattgaaatactggttatgcagcacactgtcaaccaattcctgagtacgccatggacggtttacatagttatacatgtgagtaatgtgatgactcggctcattgccatgcgcatactggcctatcagtcctgtgatatcagcagaggtagcctctccttccaactgggaagaaaccgtaaacaaagaatccagctttccaacgaaagcatcctctccacccatcaacttcaccaatcccggaatatcatgcggaacaaaccaagtccactgccatgcagttccttcacaataatcatcattacggtgattggaagaacggggattgaacggggtacgccattcacctttactatccaatccgcgcatgaaacgggtggcaggatcaaaataaaattcgtacgcatccgcaaaacgggcatatttctccttggtttcagtatctcccaggctgtctgccaacacggaaatacaccagtcatcgtatgcatattccaacgctttcgcaaccgattcattctcacgatcacacgggatatagccaagggtattcttatagtaacgagccttaggcattacataaggaatcagccaaccgggagcgacaatgccggtcgtatcatattccgccgcacgcaaacatgccttgtaagcttcctgcacatcaaaatcgcgatatcccttcacataagaatcggctaccaacgaagccgcatgataccctaccatcgttccggtataattggatacacaatcccatttcgggaaaataccaccttcttgatgcttctttatcaatgaacggataaattccgtattcaactgaggatcgacaatagtcagtaacggatgtaacgcacggaaagtatcccacaaagagaaaatggtataaaccggatgtttcatgtcggtggtatgcactttcaaatccattcccaagtaacgcccgtctacatcagtaaacagattgggacttaggaaagcatgatacatagccgtatagaaaatggcacgctggtcttcattattggttttgactgcaatctttgacaggcattcattccatttcttcttagcatcggcacgcactccatcaaaattccaaccgggcatctcagcctggaggttcttataagcaccttccgcatcaacagaagagatagagaacttagccagcacttgttcgtctttcgccgtttcaaaatgcaaaagcattttgcatacaggaatctgtttgtcattttcctgaacagtatccgtgtacaaagtatacgtgaagggtttggaaaatacggcataaaaataaagatcctgccggtatgcccaataggcactgcgtttgcgcccccgcaacacagtatcattcacagcctccacttccatgacctgattgatttgttgctgaatattatagtccatatccaagataaatcctgactccttactttccgggaaagtataccgatgcattgccgcacgctctgttgaggtcagttcggcttttaccccgtatgtatccaggaagacagaataatatcccggttcggcatgttccttttcatgagaaaaagccgatgcgaaaggacgcttctggctttctgttcccaagaaatcagtgcgttgcacacctacagtcggcatcaacaggaaatctccgaaatccgcacacccggtaccactaagacgtgtatgggcaaagccattgatcgtagtatcttcataataatatccggaacaggaatcccaaccgtcaatacgagtatctggtcccggctgtatcatgccatggggaaccatagcacccggatgggtatgtccatggcctcctgtaccaataaaagagttgacataatgggtgtaatcattcatttcattgccctcagaatcacatgcggtgaaacacaataaccctagaagacagccgcttaagagcatgttgattttcatagttctttatttaaaaattatttcgtttccgatgagataaatatattgttatcatctactttcttataattgaaaggaatagagttacgcaaagaattcagcacagactctatattatctttctttttcagcactcctgaataagtattggtactgtctacatccggtgaaaggataatcttcaccccatagaaccgttccaatgctgccgcaatctggaaaatagatgatttttcaaatggaatcaaatcattatgccagactatctccatcttgggatcgacctgttttacctgcatccgccctgtcaccctgtttaaaacagccttttgtcccggtaacaaagtaattctgcctttatctgatttatcttttacctcaacttccccctctaccagagtcgtttcagcaaaactgttatccggacggcattttatattgaaagaggttcccaagaccctgacatccattgcctgactttttaccgtaaaaggtttctcatgattacgtgccacttcaaaataagcctccccatccagatatacatgacgttctttaccttcaaaagcacgcggatattttaaaacagacgactggttcaaccatacttttgtcccgtcaggcaacaacatctcacgcacttgtccatgagcagccgatgctaccaccaattcctccgctttattccggaaccaataggccaatcccgcagccagcactatcacgcccactatagcagctgcataacgcaacacactcttaagcttgaacacctcctgtctcttttgattttcctgttccaatcttctacccaacctgcgctctgccttcgctaccagattttcctcctcaaaggggaatttacctaactgataaatctcctccatacggaataactctccggcattctcatcagattctttcatccattcattgataagaacaaaatcctcctccgagcatcggttttccaaatacctgataataatatcttcgttaagtttactcatctttttccctattcatatagtaaacaattcaacttgtaaaaacacttagcagttttgctgaaaatataatcaatgacaataataaatggctgagacgttcgcgcaaaaatttcaaggccttatacatatgtgcctctacggtacgtaaagaaataccaagagtatcagcaatttccttgtttttcatatcatgaagataactcagtttgaacacctccttacatttatccggcaattcattaatcgcttcaaaaatttcctgacgtaattcctgattctctatctttttaataacttcagcatgatccggctggtaatattgcaattttcgttcatagatttctatcattgccgcactgtagttgttctctataacctgatgcttcaataaatttatagccttggtatatacagaacgataaaggaaagctaaaatctgctctcctatgacgactgaatctctccgcctccacaactccacaaaaacatcctgcactacatcttcggcttcttcggtaccgaccagccgtgtcgcataaaacaacagcttaggatagcattgacgaaagacggccttataggtgtcatcaagttcctcgttcatattatataattcacctttgtatgaggagggagccaatgttccaaataacgatccaatcatccactgcaggggtagaaagcttccgctcatcatacaattttcacgcagattcaacccgcctctacagcaaaacgataacaacaaatatcacttttaactcacctcctgtacaattcttaataagttgaaccaattattatctataccaaatatttcccggttccggacccatttcaaattctacagtagcaccgtccattatttgccggtgtgtgatatagctcttatcgtatggttgcccatttactttcaccgactggatatagatattttcacgacttactccaggggccagtactgtgaacgtttttccattatccaaatgcatctgtatttcggagaacaacggcgtaccaatctcatattcaccacttaccggattgacaggataaaatcccatagcactgaatacataccaagcagacatctgtccacaatcctcattaccacacagtccggcaggtgcattgaaataaaggtcatgcatgacctgcgccgcatacttctgagttttccaaggctgacgtaccttattatatagataaatcacatgatggctaggctcattaccatgagcatactgaccaatcatacctgtactgaaaagaggcaaatctgcattactagccgggatataagtaaacatactatccaacttttctgtaaaacgatccttaccaccagtcaaggcaattaaccccttaatatcctgctgtacagaccaaaagtactgccaaccgttactttcacaaatatgggcagtgtagtcatccgggctgaaattaggttggaatattcctttatcatctatcggctgcatgaagcttgatgccggattgaacacattgcgataattctgagaacgcttgtagaattcgtccgctaattgagtcctccccatcttccgggccatttcggctatgcaataatcatcaaaagcatattctaatgtcttggaaagcgaccaattttccgcattatattcatcctttatattataaggtatatatcctaactttttatacagaccaatgccgcgataattatccaaattagcagtagtcacacaagcctccaatgccttctcagcatcaaaatcaccaatacctttcaaataagcatcaacaataacaggcacagcatggtagccaatcatcatatcagtctcacttccccaaaagttccataccggcaaacgtccgttctgttcataaaaagcaatgaatgatttcaccatatcattgacacgttgaggttccgtataagtaaataacggatgtgcggcacgataagtatcccacaatgaaaaggttccataattcacccaaccatccgtctgatgaattttcttatcgggaccataataagacccgtccacatcactgtaaatagtcggggcaatcatagtatgatacaatgctgtatagaaattgaccttatcgtccttgttgtcacctgttatttctatttttcctagctggcggttccaattatctttagtttcagccaaatatttatcgaaatcattgtgaggtgcctcagccgccatgtttttagcggcaccttccatgctcactcccgaaagagcagtactcagaacaatctgttctcctttttccgtatcaaaattaaagcgggcgatataagccgtacctacacgtttacctttcaaagtaatggcagtagtatccatctctaccgaagcaaacggtttggagaaacgagtacgaaaatacacatgctgatctcttgcccatccttcagaaaaacgatatccctgaatagtgcatgagtcaattatttcaatataagaatcattggtaaaatcccaattcatcgctttcttcagattcagaaagacagccgactctccttcaggaaatgtataacgctggatgccgcaacgctctgtagcagttaattccacattgatatcataatctttcagcaacacgcgatagtaacctgctgaagcttcttcatccgcatgagagaatttggaatagatgcctaaaggagcttccgcttcctgataaggcaaagtaacaggcataaaagagatatcatacaagtctccggctcccgtccccgacaaatgggtatgactgaatccggcaatcgtactgtccggataaaaatagccggaaatacggtcccatccgggcaagccgttatccggactaagttgtaccattccgaaaggcgcttgcgctcccggataagtattgccggtaaaatcggttccgataaacggattcaccaattgggtataatcggttgacggctgggtttgtttattggacacacaggctccaaatgccactaaagaaatgaatagcgcgagaacaggtgttttcatacttaagaggttttgcattattactttgttacaaaaatacacattataataatacgaacaaccttattatgaaaaacacttagctttaattcattattttttcgtatttaaatagtaaagaagggattctttcaccttttcatccgaagttacaatcaaaaattcaccgcctcttttatcatacagaaagcaataggtcttataaagagctatacctgctatctcttcccaagggaatgtctgtttcagtttcgccttgtcatatgtcaacccttccggagttatttccacccaagtctgccctgcaatactccgcttataaattttatttagtctgacaggcagcataatcaagatatagataagacacaagaaccaaatcagcagcgggctgaacaggctttgctcttcgggaacaatatagtgccctgtacacaatgcaatacaaatataaatgataaacaacaaagaaaaactgaaatgacggatgtcccacaatttatacaaagcatactttttcaggctgatattataatcacaaaccacgacacctggttcccgtgtcagtttgcttttcggtatgctgaagatacgcaatatctggattccccgcttcacgccgtacccgaataataaaaccatcacaccaagatttatcaagatccaccaccacaatgattcgtttgccaaagccggttgcccgacaagcaccattgatgcaaaagtgatacccgccaccaataacaacatactacaaattacagttaaaatccatcctcttgttttcataataacctttttactttattccatgacgggaaacaaagataaaagattatggctagataacaaataaagagccgtcgaattattaatcacagaccatattatacataaaattgcccggaagcaatcttatttgccattccttcacacctcgaatttaaattgttgtttggttaggaagttagaagttttttcgtatgtttgtcgcaaatattaatgaaaaacacatttctatctatgaaaaagagtgatattctgttctttttatttataatagcattgtttctgcccttttttattagtgataccatttatgaatgatacaaatctttcaatgcaatccatggtatggttatgagttttgtgaagttcgccattctagctactttgggagacaaaattcatctcttccctaccctacctttccaatactttccctacctttgtgccataagtacgtatgacaaataccaatatggaacaacaacaatcatcttataaagaaaaagaacgtatagaccttcacgagccgcgacgcttcaaagttatcattttcaatgacgactttactacaatggaatttgttgtaaagatattaactaccgtttttttcaaatcaacgatggaagcagaagctttgatgatgcaggtacataaaagtgaatcggccgtagtaggcatctatacgtatgatatcgcccggtcaaaagtacaaaaagccacccgtatggctcgtgaagagggattccctctccgactcacggttacaccggaagaagaataaaaaatcaagaataagatatggatataccaaataccgattcggtgaactacgctttcgcttctgcgcagagccaagcgatgcaatatcggcatgaatttatcacgcccgaacacttattgagcgcattgctgaaacaagttccttttcaaaaagcattggcagagtgtttttgtaccccggaagaactgtcccagtccatttccgaatatctgtcaaaagaagtggaacgagttcctcaagaaatagaatatgaattggaaatttcaggtcaactctccgagctgctgcaatatgcctatatgacaatcagccattcaagcgcagaagaaatggatgttcctcatctggtacaaggaatgcttcaactggaagattcatgggctggctatctgttaaaaaaaacagtgggcgaagatatgccggaattcctcagcaccctcatttcaaattacgagcacatgaatcagtttcaagaggaaacttcctctgagcaagagaaaagcgagccttggcgtaactatgttacctgcctcaacgagggcctgcaagaccggaatccgcttataggcagggatgtggaattggaacgcaccattcaggttctctgccgcaaagaaaagaacaatcctctgcacgtgggcgaaccgggagtgggaaaaaccgcactggcctacggactggccgcacgtatagaagcaggcaatgttcccgaacgtctcacaggttgtcgtatctacgagctggatttaggtaacttattggccggtacacaatatcggggtgagttcgagaaaaggctgaaagccattatggaaggaatacggaaagaaggacacgccattgtatatatagatgaaatacataacctgataggcgccggacggacgggagacggttcgatggatgcctctaatatgctcaagccttatctggaaggaggagagatccgatttatcggctccactacttacgaagaattcaaccgctatttttcgcgtagcagaggattagtacggcgtttccaacagattgacatacaagaaccgggaatcgaggaaaccatccacatagtggaagggttaaaagaaaaatacgaaacgttccacggagtgatttatgaagaaggagtgatagcgtatgccgttacagccgccgcacggtacatcagcgaccgtttcttgcccgacaaggccatagacctggtagacgaagccggtgcttatcgtgagatccaccccacagatacagaaaaacaaacggtggacaaagcattgataaccgatatactggcacgtatctgtaaagtggatgtacttgccatgaaggaagaagacaatgccacattagaaaccttgcatgaacgcatcagtgcaaagatatacggtcaggaagaagctgtctgccaagtggtggaagccgtacaaatggccaaagccgggctactggacgaaaacaaaccactggcaagccttctcttcgtcggccccaccggtgtgggaaagacagaggtagccaaagtattggcttccgaactaggtatcgccctgcaacgctttgacatgagcgaatatacggaaaagcatacagtggccaaactcatcggctcacctgccggatatgtaggttatgaagacggtggactgctgacagatgctatccgcaaaactcccaattgtgtgttactgcttgacgaaatcgagaaagcacatcccgatgtgttcaatattctgctgcaagttatggactatgccgtactgacggataacaaaggacgaaaagcggactgccgtcatgtgatacttatcatgacctccaatgccggagcgcaattcgcacaccaagcctctataggtttcggcggacaggttgctgctggagaggcaatgttgaaacaagttaagaaaactttcaagcctgaatttatcaaccggttgtctgcaacagttgttttccatgatatggattacggaatggcttccctcatcctaaacaaaaagctcggcgaactgagaaacaagctgtcggcgcgtcatgtagaaatggaactcagcctggaagcctataaacatctgctgaagctaggttttaccaaagaatatggggccagagaaatggacagggcaattgcctcgcatctgaaaccactgcttatgcgtgaaattctattcggaacattaaaaacgggaggcaaagtggaagtgacagtagagaacggacaattgagcttgcaagtactcaaagagcaacaagcctaaatgaaaccggtaactcctccgtaggggcatacatacgagtcagtccctacaggagacagtatatgaatcacacaaataaaaaacattatggtctttcaactaactcaaaaacttgttttccccgacccttactatggcgagccggacggactattggctgtgggtggtgacctctctgtagaccgcctcatccttgcctattccaatggcatatttccctggtatgctttccgtgaaaaacagatacaatggtggtgtcccctgaaacggtttgtgattttccctaacgaaattcacatttcccactccatgcgtacccttatgaacaaaggacgatacggagttagttttaaccaggcatttcatgaagtgattcaaacttgcggtaatctgcggatggaagaagcgggagcatggttgggagaggatatcatgaaagcctacacccgcctgcatgaacaaggttttgcagccagtgtggaagtatgggaagaatcttgcctggtcggcgggctctatggagtcactttgggaaagtgtttttttggtgaaagtatgttttctttggttcctaatgcgtcgaaactggcgcttatctatctggcacaaacatttcaagaattgggagggaccttgatagattgtcaatttgagacaccacacttaaagtcaatgggtggaaggtatatagactatgaggagtatatgaggtatgtgcaggaacctttcgagtctctgtaaatgtctcttttttaccaattttgattatcaaatcatcagtctgaaataaaatataggatatagagctaagattatcaaatatatttgctaactttgttttcgacattacaaacagaactatttaccaagcctcagaaacaatatgaaaaagagattctactgtttgctacttaccttctttgctttgtcttgctccaaagaagaggccgatatggatggtgacaaaaataaagaaacagaaaataaagacataaaaattatattagaagcagaaaaaagttctcaaaacatatttgctcctattgtgttttaccaatcttttgattttggtaaagatgcaccttgtttaagcgaagtgtatgattccatagtgtggaaatcatctcattccccaaatagttttaaagtattcagtcattcaaattacgccagatatgtggaaacaacattcttcaaatgggcacatgtttattactcacccggcacatacaagacttatctgctaggttacaaaaacaatgaaataatctatagtagtgatacaatatccattgatatcacaaataaaaaagatttcctagctttcaattggaaagacgtaaccgactccagttttatcacaggctatgcaaataatctagacgaatatcatctgagtacacagactcatatccatcaaggtattccatctgttgtgctgtatgccagaagtgagaaatatgaaaaagggggatctataaaaagtaaacagatactgtatgactacataaattcatttttctcattacctaattataccgcaacctcagacgaatctttgagaaaagaattcagcactatattttcatttcaagaagagaatgccattccactaaacatttggcttacccccaaagctaaaattgtactcctcagaaaagatttcaagggactagagagcgaatacaaaatttatgccgaaccaggagatttgatttaacctgcaaaacacaattgtttaactaatgaaacatcaactctgtatatagctacattcaacaaatagcactacctccccaagctattcagctattctgacggatcttaaacaagattcgttacagagttttatacccctattatcaattcatacagattatgcaccatccccaaaccgataagtgcataagcatggtgtatacattaaattaaacaatgaattatacatatagacaaatatggctcatcaactttcccataatgatgagcgttttaatggagcaattaatcaatattaccgatgccgtctttctgggccatgtcggtgaagtggaacttggcgcatctgctttagcaggaatatattatctggtaacttatatgctaggcttcggtttcagcatagggctgcaagtcatgattgcctgcaggaatggagaacagaactatgccgagacaggacgtaccttctttcaaggactctttttcctttccggactagcgctctctttatatttgttgatacagggcctttctcccttccttttgaaacaattaattacctcaccggaaatctatcaggccataacggactatctggactggcgcagtttcggacttttattttcatttccctttctggcactccgggctttttttgtgggaataacaaagaccaggaccttatcttggtctgcaatagcagccgtacttatcaacattcctttcaattatctattgatatttaccttaaagtttgggatagcaggatcggcaatagcctcaacgctggcagaaatggtatctttaatcattctccttgtctatatgtggagaaagattgataaaaacaaatatggactacaaccggtagttgatggaaaactattgagaagactgttttacctgtccgtatggagcatgctgcattcttttatcagcatggcgccatggttcctgttcttcgtcgccatcgaacatttaggaaagatggaactggccgtatccaacattacccgcagcgtttccaccctcttttttgtgattgtcagttctttaggaaccaccaacagttccttggtaagcaatcttgtaggagctggacaacgaaaaggtgtttttcctatctgccacaaaatcatcaaaatgggatatgccatcggtcttccactggtaggaatcgcattgctttgtaattattggattatcagattttacaccaacaatgaaacactggtgcaacacactgtcccccctttcatcgttatgctgtttaattatgtattcgcagtgcccggatatgtttacatcagtgctgtcactggaaccggaaagacaaaaattgcctttatctttcaaatggttaccattatggtatatcttctttatctttactggctgagccactgtatatatgcacctctagcggtatatatgacaacagaatatctgtttgtcatcatgttaggaatacaatctgtcatttacttgaaaaggaagcattactaagttccttgccacaccctttctcccgattcattccggcaataaatagttatttataactatcttcagtttgaaagcttttctctacttttgcaaactcaccataaaagatagcgtatgaatattttcgacattgccaaacagaatcaggagaaagcctggcaagttatcaaaaacacgaacatcatccagatatgggaagatgccggtgcaaaaattaatctggtaggttcactcagaacagggttactgatgaaacatagggacattgatttccatatttattcatcacccttgaacctagcggacagttttctggcaatggccagactagcagagaatccgtctatcaaaagaatagaatgtgccaatctactgcatacctctgaagcctgtattgaatggcatgcatggtatcagaatgaagaaaacgaactttggcagatggatatgattcacatccgggaaggttcacgttatgacggttattttgaaaaggtagcccaacgcatttcggaaattatgaccgatgaaatacgggaaactattctaaggttaaaatatgagacaccggaaaccgagaagattatcggagtggaatattatcaggcagtcctccgagatggggtacgggattatagcggatttaaggaatggagaaagcagcatcctattacgggagtagtggaatggatgccttaacccgatgaaatcgggcaatcagcttaacagccccgactcctgtcccaggcgtatcgcctccaaagagttgtgtactcccagcttacgcaacagattttgccggtgaatatggacggtatgaatactgatacataatttatcggcaatttctttgcttaagaatcctcgttggatgaggcgtaatatctccatttcacgtccggtaagactgacaaccggattcattatcaccacaccgggtgaaaacatttctccatttctcagattcagaacagtacattccacctgttctgattctttctgaccgggggccatactcatattccctataatgagccatgcttttccgtcatggctctgttccaaaacttgatgcctgcttgttacacgcacatagttaccacgagcattgagtatacgaaaactatatacattacaatagtcattccgatgttccaaaggctggttataaatgaacttccccagcctgacttgcaagtcttccaatagggaacgatcatgcggatgaatacgcgactccagataatcaccctgtttttccaatgtttctatcttgtgcctgtcataccccaaccaatcgacaaaacccgtagaagcatacgcataacatcctttatatacatccaccacgaaagaacagccgccattgattctagataacttccggagcatggatttatcccgttcccatactgcataatctatgtttttgcaagacaaatgttgctttgcccacaattcctcacgggtgacatctgttacactcatattcttactctttatcaaagtagtacttcaagaggatagatcttctcagcttactcacttacttttgtcaaagtaaaacagtcaatatccggagcccagcaaaatgaacttcccatacgtaccttattataccctgctttcaaatgcaccggaacagtaatcgaagctattttttgagtttcatccgccgacagcgaatcaagaagaatccttttttcattattcacacagacttccagcttacggtctgctttaggcacatagcggatagtcatttcgtatttaccgccttgctcactgtacacctctttccattctgcaaaattctcttttcgccctcccagatagcttaccttcatgcctccggatgcttcatgtaacggaacatatacgatgcttttcggagtctttcccaaatcattgaaacaaggcagataagcccattccgcttcataaacagtcggttccaacctcttttcggactccatacgtaaaatcagcacactatggggaggcaattcccgattcagaacacccccttttatctccggtaaatcctgctgtttcatcaggtctcgtaccttaacttttcctcctaattccaaaatattcatcggaactgtaaagttacaaatcgtgtccgaaggattgtataaagcaaccgcacgtacattaccacgcttccgttctatatctttcaccaacacatacccttcattttcatgctgaactacgtatgcctgtaatcctaaagggtcttggttcaaagctatcagttctttatttttcaacagttttaatgacgcctccggaatggttgtcagatcacatcctatcaacaaaggtgaactcatgatgcaccacattcccaaatgcacctcttcctcttcaggctttagcccccggcctatttccaacatatccatatcattataatgaccttctcccgcataggcagacagataaagatttttattgataatatactttactgatccccactccggacggatatccgcactgattcgccatgaacgagcaatgtttctagcccaagtacccgggaaagcccatcgacagatattaatagaaacatgtccgcaacccagattatctatagcctgacgaatctctgtatatcgcttttcctcttccaaattcaattcctgaccggctccgcaataatcaattttgataaaatcaaatccccactctttaaaatacaacgtggcatcctgaaattcatgtccatacaaaccggaacctattccgttcatatctttatcccagatagaaccacaagtattgcttcccgcatccgaataaatgccggcttttaatcctaaagaatgaatatgatcagccacccccttcaatccgttcggaaaacgttcgggatgtgtttgcatcactcctctttcatcccgccatccaaaaaaaccgtcatctacattcacataggaatagcccacttctttcaaccctttctgcaccatagcatccgcttgtcttattattaaggtgtcattgatatgaacccgataggtattccatgagctccaccccataataggagattcaaaaactgtcgtattttgggcgaatatgccggaacatagaccaaaagctaaagtcaaaaacaaatttctcatattcattaattctcattttttacttaaagaaatcatcaagaaggtatatcttatgatcctaatggttaacaggaaaataaaatcagttttatcatgtagagagcaaagataacgaaaaactcttaccccaccatatactatcccggaatttttcggcaggcaggatagcggccatcataatccgggaattagttgaactttaaatataagccaaactgacaaatatctaaaaatactgataggaaagatataaaagaaagcaggtaattacatatgtaattacctgcctaatgcgcttttaagtaaagttatgtactttctttggtggtgccaccaggaatcgaaccttttgcttcggtttattctaactccttgagtgactgcacattttttgctttatcttttatgaaaaccattgaattggccttacgctaaattcattgtttttctttactaatctgacaaaatttgtctctttgacactgcaaatataatacacaggttcgatttctgcaaatattttcattccttttaattatagttttcaacaagagaaaaaaataaaaacatgtgctaaatcaaatgcattaagaatttatttattgtttggggtgttgactttaaagttggaaattttgcttcgcaaatcattagaaagatataccccttgaatctttattttgcatgaataaaccaaaagcactaaaagagcaaaaatacaaatgacgactatttcactaggcgccaaaaagtttggaactgacttgggcatgaaggcacctgcaaagagatctactaaacataagattatagctcccacctttcctaaagcactctttacctttcttgatttttgtatctctatatcgcttacaatttgtgcaatcacagtattattggttttcattgcatattctttcaacgtaaatatcgaaacttcttcattattaaatagaaaaatatatttcccaattaagggtactgctagtgtacataatgcaaagaggatacaagtaaaaaatttcacagtccaaatacagacaatacctaatattacgaatggaatcaggtttattagagttaaatcctgaaacgtaattccaggttctttttggggacaacacacacctaaatacaaatctgtaaacaccaatagaataaggaaatttgtccatatatccgtatcataaatcttgtggttgtcaaataacgcaatcaaatctttcatgttgttcataaatacttttttaaattaatagtttatagtaaagcggcagtcaacattttaaatttccactgtattaaaatagagcctatactgaaaaggaacagggctattggttatcaataccctaaaaccttattcgatataatgtctacagattataccattcaaatatattatgtgttattggattttacaaatatacagatactattcagaatgtcataacttctccataaatattattttgtacagtttttttacttataattcatgcctttatcatactttgcggcattgctgcatgaaggaggtgtgcatgccaaaacagaaaagtttttgagccattcatgtaaaaaggatatacaggatgtcatctgatgacttttaatgacatctgatgacactgctttttatgtttcggatataaagcggttctttgtcgtgtattaatagtgaactaatccatgaaaatgagatgccatgaacatacaagaagcaaagaacatcaggcttgttgattttttagccggattcggatacaagccggtaatacagcgtgggaacagcgtatggtacaaatcgcccttcaggacggaaaaggaagcctctttcaaggttgacctccataaggaattgtggtatgatttcggtctggggaagggaggggatattataacgttggccaaggagatttatcggacacaagatataggttatgtactacagtgtattgaggataaaagagccgtactgaaaccggttactgtttcctgtccgtttgaaaaggcatatcccgcctttcaagatttgaaaatcattcctcttgccaaccggatactgcttacttatctgaaggaacggtgcattgatctggaaactgcccgaaaaatatgcagggaagcccattttaaacggaatgggaagaattattttgccatcgctttccctaatatttccggagggtacgaaatcaggaacaggtatttcaaggcttgtattgctcccaaggacatcagtcgcatcattagcacgccggaaagcaggatttgctatatttttgaggggtttatggattttctgtctttcagaccggcttttccatctttggaagagggggattatatagtgttgaattctgtcagtaacttacagaaggctttttctttcctttcacaatatgacggcatccgttgctgtctggataatgataccgccgggaaaaatgcggtgcaggcattaaaggacaaatacggaatccgtatatgcgatttttcgcatgaatattccggatataaggatctgaatgaatatttgtgcaggaagaacaatctgctccatatctaatagatgtattgaaaagactgcctgatgatatacccttgtttctttcctgtcatatgtggcaggaggaaacaagggtgatttttcatgtggtgatactatgttaatagtagaatgtggtcagatgcgttttatggtcttttacaatctttacttcatgcatctgtccgtatatctcacgcatggataccggacaatccatcttttcccattcttccggggaaatcctcatgtcggaatgcctgaaacacagcatgaccatttcctgagaatcctcttctgcgaatatggtaccttcatggtcgttgacaaactgtttgagtccatcctcatccttacaggatatttctccgacgtacatatcctcgctcggccgggtgtttttgcggatatggattttgaaccattcccggctttccggctgttcaggtgcgccacactcccacagggctattttcgcatcgtagtaaacctccccgttttcacatgccccgtaatgcccccaatgcttgaaacggccggtagtccatgccttgaaccttacatcgcctgcctttaccaacagacactcaccgccatgcatatcgcatttgataccctctttgtcacgggacacgaatggaacacgggaaaaatcccggagtataatgttatctccatatacggcatctataaagaacagccgggaacgctcaccataaccggaaacaaagaacaggttgtctcctgtccgtggatactggccggagcgtgtcttttcgatgtgttccaccatggtattcactttatctatatcttcctgtacaagtccatatatccgatcataccagtagttcaggcggatgaaagtttctttgctatacttgtttgttgtctgaatcataatttccttattttgtgattaaacatttccggctttggcaaagccggtatttctatctcttacatgtcagacatttgtcttttgctctgatagtgcaaggcttggcgaaaaaataccgcagcgaagcgaggatgattttttcagccaaccagtccgaaggaccgccttgcgcatcagaagcaaaaggctacctttacatgtaagaaatagaaatgctgaccgatatatgattccaaaataaaaaaacgtataatctgccggttctgtaataagaaagccatgaaaccctctctttttatcgtttccatgactttcttatgtttatgtcgtgatacttggaaacgggtattaccaatgatcaaatgtttccaccctgtttttttccaacagaacaagaatgtccttttccttatataataatttgcctcctactttgtaatagggcagcctgccgttcattctgtaatcagccagcgtccttcgtgtcagcttcaatttctccgccaactcgctgtcggtaatgtaacgctctccgttcaggaccggacgaaggtttttctcctgatcatccagcattttggacagggtgcttatgttccgaaaaaaacgtataatctcagggctttctttggtcagtatgaattgagtcataaggattcgggggttacatggtgaatactgttttccaaataacgtataatatcctgacgcctgtaatataccttgcggtctatatggctgtaagggataatcctgcttctccgaagttgcaacagctttcggggcgagacattcataagcatacacgcttcctggttatcaatccagtcatccatactacagatgcctcctccgcatgtttcacgcattctcttttcaacggcttccaaagcctcattcatttccatgaatgccttagcttcgatacatacaaattccataaactctgctttttttgtccggcacgaaaatacgggaagtaaaagtcatgggcaaaaggatgtcatcaaacggcatcagatgtcatcagatgtcagagaccgctctgtttggggaagcaaattaaaagaatggctaaaagtctgtttctttaccggaaaaacagtatttttatcccggacaatctgtccgaaaataaaaaaacaggaaatatggaactgataatcaatgcaacattattactaacggctatcgttctctggatatacggacaatactggagaaaaaagtgcggcaaggtgctatgccaatatgcagcagcctacgatgagcgggaagacagggagaaaccgctacgtcaagccatcatagcaggaaatcctcatgcaccgctgttatatgcgctgacttgtcctgagctgtttgataaagtccgtccgttgcgattgttctcattcgggagcattcgctgcgtgtttgccggctattattttcccaaacgctttgaaagctggctttgtgatgaccagttggcattcgtgcaaaaagtatatgatttcaaggatggaaaagacagctgtacggaatatttttcacaagcattcctgcttctttccactgatgaggatattactgccatgtttatgccgtgcagcacatcagaccgctattacagacgtttctcaggtattgccggttttctggaaacgcatggctatgtccgttcaggactggatttaatatgcattacggaaagcagggagtgtaaacacgcctcagaaaaacgctctgaaataaataccgccaactatatgatgtcaaacgatctgtacggaaagcgcgtggtgattgtcgatgatttgctgaccagcggatccagcctgatggaatacgcccataatctggaaagggccggtgccaaagtggaaggtgctgtatttcttgcccgtacctttcagatgccttcgccggcaaaagtaaaacgcctggtatggaaacgccatctatcagtcctgatccggagaaggtctgacgacctgtaaattgtaaagtttacattcggattttacaattttacacctcgaatttttacatttcaatttcccctatactatttttatatctgtattttattgatttgcagtgttatataattccccgtccaatataaacggataatgtggcatacatttttcactgaacatggcatatactcttgaaagtgcgcacaagaaaagggtattccagtaataacctttaaaaagacaggagaaaattgccatgatgtatatagacaatgaagtgcttgaaaaaatgataatgaccatagtggaaggttttgaccgtatagaaaagaaactggacaggatgggacgcgtgaaggactgcctgaatggagacgagcttttggacaactatgacattgccaaactgctaaacgtgtcattgcggacagtcgcccgttacagggaaaaagggctgatccgttattaccagacggacgataacgggaaaaacttctacagaagctcggaaatacaggagtttttacagaaacgtgggaaaaaagataagggcgggaataccaacatgggaaagttatgctaactttgtttcataaacagttgttatgaagacaaatgccaattcaagatataccgttgcagtccttattgacggggataacgcatcctttgagaggatggaagatataatgggctttgtttcccgttacggggatgccgttgtgagacgaatttatggagactggacgaggaaagcgctttccgcatggaaggaaagtgccagggagcatggattcaggcttgtacaagcttcctcccatgttcccggaaagaacacgacggacattgcactggtcatagatgcgatggatattcttcgggacgggcaggtggactgtttctgcctggtggccagtgacggtgattacagcctgcttgcccaacggatacgggaagccggggtgaaagtgctgggatatggggaaggaaagaccccggtgtcattggtacggtcctgttccgtattcctgtatgccgaccggaaggaaagcaaggcagaggagaacactcccgaattctttatccgaagggatatggagtatttcgacaaggcttttgagcaggcggctgacggcaaagaagaggtttccctttcactgatcggcggtgcattgaaaaaaatgatgcccaaattcaaggtcaggagatatggatgcaagacattgggcaaactctatgaaaagttggaccggtatgagctggtcatgacggaaaagggagtggcaaatgccgtacggctgaaatattaaaccgcatagcaggagtgttccaaaacgtcagtttctcctatacatcgttttatgtatcaggagaaactgacgtttgtgttctataccgggatggggtttacccgtaatgtgtcaagattgagataggctccccggtagaacgttcttccttccctgagcatgcgccacaggacgtcgcatccgatttgtgccaacatggaattgatgaagagatcctgtttttgcaatgcctcagtcagcgagcagctcggtcctgaatccttctccctgatggtggaataagggacttcctccgttatgacgttcatcttgggtataggcaggtattcagtggaggagggctgcggtatcttgcttttgacattacctatcagtacttgtccggtggtctgggcattgccgaaatccatccagtatatcggtgatttctcgtcatcgtatgaacgttccctatgctttttcaaaaaacgccacagaccggtccgtgaacgggtggtgtccgtgcaggtgatgatgatattcgccaaaacggaatctgatgttcctgacggatagcattgcccttttgcttcccatgaaaagccgaaaaagcggttgatacgggttacaagtgccaccgccttgttcagtccgagctcggattcgctgaacaactggcgtccgatgttcgcttccgtgacagtatcggggtcaaaaaccgtcaagtgcaggcccggatgtccgagtgcctgcaatgcgatactcattcttgccagattggtggccacctgcgatccggttccgcccgcaccgattacgaaaacggttacgggatggtggggattgagcaggtatctgtctgtataatgaatctttttcatatcaataagtctttaagttgtctgtccataggtttcaattcgttatagtcaaacggattggtccgtgccttttccgtcaccgaaaccagattgctttcggtgggattcctgcttcctcccaaatgggaaaattcactgagccagaagcgtttttcccaatgctcaaggagttttgagaaagtcatgttttccggaggagtcaacgaggcatttcccaggcagacactgcttcccgttacattgaaaaacggggcaaggaaaagcgggctgtcttctgccggtgcttctcccttataggcaaaaatttccagtctgtcaccggaagccctgtaaatgacaccgggtacatggaatgtcccgtccggaatattcagcctttcggaaaagaacatctgccgttttcccggaggattgtaccagatgtacctctcgtgtcccttgcgtgtatcgcaccacagcatattggtggggattttcccatgcggtacatcctgccggttatccgtatagtattccacaagggagtccataaattcatacgtaacggggacggcagcctccatccggcctctgtcgttgatcggatgcagttcgagataatatgtcccgtgtccatagcggccatcactgtattcgtaagcaatcagtgccgctttgggaaccatcacctgttgaagtttcttagtcagttcattcatgtcattcgttttaaaagttgtcatcaatatagcctgtaaaacacaccaaccatctggaaagcctttccggatagtcatccatctgaaaaagactgtccgtttccggtgtcagtagcttgtaagtgaccggagtaagggcataggtttcctgataatccgaattcatataccccttgacacactccgccaatgtatcatcagcagaatagaccagtatgacctggctttccattcccaccgggggaaaatcgcattcctcttcataagcccaatcgtactggtagcctgtcaataccgggctttccggagtaatcaatgccatgccgtcctcaatcagttccaacagcttcagctctttttccttttttgtccggtaattccgcacagcctcctccaaagacttgcagaacggtttgcccgacatccgtctgagtgctttcatccgttttccagactgataggaatctgccagccgtttgttcgccctgatttccttcggggaagcatcggaatcccggtttccccagtcttccagttcttctatggcaaagtcataacaaaatgtctcagtaatatcgtacagtctgtggtgtcggacaaatagccggatgaactccctgacaatgttcttcaatgatgccgaaagccgttcggtaaaatcaaccggaatccaaaacaaagtaggttccggccagtcatgatggcggaacagacagaaatgcagccttccgtccttcttttccagattgatacactccggtacacactcttccataactctgtacaactcggtaatattcaggcgggggcaaccccctttcctgtatcggaaagggagttttatacccataagttccgcatatcttgatgccgaccggtagagatagtcaaaattttccggagtcgtgagattgaccggagaatcattatccatatcctgatgccaataatccggtgcaaggggtgtgattctaccggtcagaaaagcattgtgcttcccggtggcagaagtatccttcttttccgttccgaggttccccttcggatgtgggacgaacttactgagagaataatcagccgtgccagtccatccttggcttgttctgaaagctgtctgcatgtttccttatccttttttttcttgttcataccgcttaccctttcactccgatggttgtcttgaagcggtaaaccgccttgtcgtcctcccactcaggaccatgtaccgttgccgtagtcagttcagggtaggtcatggaatagaagtccatcacctcgtttacggacagttcgctgttcggatcatccaacacgagctccacggagtccttcttgaatttgaatactctctgcaatcctttgatttcaagtgccatattatttttcttttatagggtttaacaatataccatatccatttgtgccatatccgtcatgcggcattccttcggaaagtccggatattccgcataagggtcctccctgagtagctcccggtcatcctcgtaatccttgtcgaagttatacattgcagcctcctgcaccgttgcatactgtgacggagccggttgttgcatccagcgattgtccgccaattgcggttgcggcacctgtaccggttgatggaactggatttcttgcggttgtggagcagcctgctgaggaaccggttgcggtgcaggttgcctatattgtacgggctgtacttgcggctgtgcaacgggttgcggagccggggcaggctgttcgggcatggacatcggaacttgctcttcgctccggtattgtggcgtctgggctgccatcggttgtggagccgattgctgcaaggatggctgtggatcagttaccggcggctgtaccatgtcgaacagacttccctcggatgccttcttctgcacttccgccatttttttgtcaatgtccgcctgtttgtccggctgtgccagtaccttagcctgcctgagccaggtcaatgcttcggaataatgctttcctgccgtggcatcctcagctttcttcagcagtttttccatcttttcccgtttttcacgggcttccttggactccttttccaccgtaggcttggaggttttgctttgtgaaaccgcctgctctgcctgcttctcgaacgattccaggttggtaaggataccttgcgctttctgtacgggtgcaccgacagcctgcaggaatcctgcatccagttcttccggcgtaccgttcaggatgagcgggacaatgcgttcgccggcctttactcccgaccgtctgggaacgacggcaaccgtcagattgtcgtttacccgtctgatgttgatactcaggtctgtgcctgccgtaatcatttggttgattgcttgaaaaaacataatggtaaaatttaaaatgttatacataagtttccttgaaaaaatccttcaggattctctgcctgtccggattcgaggcgatgcctttcaacggttccagatagtagccgatacgtctgggcccgtctgtcgtacagggaggctgtcttttgacaggtgttgtccggtttgtggcaggccatgcagccggcatgaccggagccgaggatgtaaatgtgtaagttctcatatcttctgcatttgatggttatacaagcatgcccatgacaatcaggacaaggattgttttcaagacaaaggtgaatgtcctgaaggcgagacggaccagtgttccggacataaggaacaggacagacaggtacacgggaatgacgcccttgcagtaaagcaggcatattcccgtaagcagaaccagtgcgaccacttgcctgcagatgttttcgatgagtttcagtttcatgtctttaaatttttaagaatgaataatcccatcgggatatgttttcccgattttataggcctccggcccttggattgcctttttgcgcaaggcttggcaaaagaaaataccgcagcgaagcgaggatgattttcttttagccgaccagcccctgaaaggggccgccttgcggcaaaaacgaggcaatccaagacctttgccgcttaaaagcggaaaaacgtatcttgtacatatataaaaaagaggcacagaccccagtctgcacctcttctgttccgtaccttccgcccagccgtctatatggaaccatgcggctgtccatcttccgaaagtttccggaaaatctcaccggtaacctcatttaccgtttccaatacgccatccagaaattctttctgtgtgagttctccctgttcaatccgtgccagctccgcttcccagccggaggtgagggaggcgtcagccactttcattccgcgtaccgtttcatataaaagaagaccttttggggtcgggataatgtatttgcccgaataccggatatatttacgctccagaagcgtacggatgatattcgtgcgcgtggatgcggttcccagaccggtcttgtccatatagtccgccagttcctcatccgtataaggggcagcgggcagcgatttcctgtgtataaggctgcatcccgttaccggcagcttctcctcccgaaaaagttcagggggtacgggacagaggtcgttgtcttccgcgacaagccgttccctctgaaagataccgagccaccccgcttccagaatacggtatgtacggattcggaacttgcgtgcggcacagaccgcttcaaccgtcgtatattccaccttgcagggcggcatgaacgtttcaagcatcctgccgacaacaagggtgtaaaccagcctttcctccctgtccagttcccccggctgtatgccggtgatgacaatggcatgatgctccgccgtgtcctgatttccggttacgcctttccttgcagcaaggtcgatcataccggcatattgacggaattccttgccggacagcagcttttccataaccggaggcaacatgtcatacacgtctccgggcagcagacggctggaagtgcgcgggcaggagatcagttttttctcatacaggctttgggtaatttcctgcacccgtatggctgtcaggttatggtaacggttcgcatccttctgaagcccggtcaggttataaagggcaggtgcggtgatttcctcagtccggctgttgaccgccgtgatacgggcatatcctgccgccttgcagtcctcgtaaagttccagggcatcccggcggttgcagaaatcttccacatgccgcatctttattatcttcccgttcttgcagaggctgacgaatacgggccagctgtctgcgggaatgtgattttccctttccctgtaccgtccgcttatcgctgccaatacaggggtctgtacccttccaagcgagttgttcccgaaaccgaccgccttgcagacggcatagctcgaattgactccaagaagccagtcggccttgttgcggctgtctgccgccaaaaacaagttgtcgaacaggctgcagggacgaaggttttccattcctttggcaatggcttcgtccgtcaaggaggagatccacaggcggaggcaaggtttcctgcatcccaaaaaacgataaagataccggaacagcatttccccctcgcgggaagcgtcggttgccgcaacaatggtgtcacacgcatcgaacaccccggctatcaccttcaactggagcaccgcattgatgtcgggattccatcccgtgtccgtctttacatgccgtaccgtcagaaaaggaggcggcagcagggggaagttctcccgctccacccatgccgtaccggtatctttcggcatcgccagggaaagcatgttgccgtatgtccatgttaccatgtatccgtttccgctcatatatccgttctcttttctgtcagctcccaaaacccttgctatctctctgcccacattgggcttgtcagtcactatcgctatcatattctttttccttttgatgttccgtaccgtcaggaacggcacggaacgtgagttatacttattgtttcccggtcaaactgccgcctcctccttctgacggagaccgtttatttccataaccggtctgccgttgccgtcgggtaccagcttcagcgtggcatccattgtcaggctgaggaccgaaatatggagtttcagcggaacgatgcccgtttcctttccttgcagcaacagttccatgttgccttccgcttccagttgtttcttactgatacctgcggccttcagaccgtcccagtcgatatcttccgtcttataaatatgacgggtattctgatccgtattcatacgattcgtttttttaggtttgtatgattgattctgtttctctccgggcaggtctatactgcctgcgatgcacccttcttctgctcctgctgttgtccctgtgcggtctccgtctgtgcggcacggcgggaagtgtccctgcggatgtccggattttcctgaaaatactgcaactgcccggaatagggattgactttcaggtaggaactgaaggtctgcccgttgtttttcagcccttcgacaagcaaagtcttgccatcctggaggttcgctttttcctgtgccgtgaacacgtgcccgtaaacctccgccggaatacgcggtgcctgctgctcgttgaatccgttcggcgtgcgtgaatacatcgtcctgccggtattcatatccagcttgacgaacgaggagaattcctccccgttgcgcccgatcatgttttccagatagaccggctgtcccttgcgcagggtttccctgtcttcggcagtcagctgcacgttgcagatttcctttggaatataaatctctccggtttccggattgtgccgcgtgtagttcgggcgccccgtaaccttgtctatcgttacaaaggacgagaaggtgtcattcctgttcctgaacttcatgtcttccaccagaatggtatgtccttcgctgagcatttttatctgggtgggcgagagaggcacgcctccgatggaacgttcgttgaaaatctggtttttcggaaagatgaattccagtcccctgcgctcggcactgtactggagtgtggcatcgaattccttgcctgctttggaagtcataccctccactttgacaggctgtccctccttcagcagcctgatctcctctgcggtaagtttgaccccgctcacttcctgcgggatgtaaacgtgctcctgacggacggcaaccagctcgttggtgctcttgtcgatggaaatcagacagggggtatattcactgccgcgcaggttgagttctgccacacgccccatgttgccggtctcacgcaggtttttcttgtcctcctcgttaaagttaaacccgaaataaggacgctccaactgcggttccttgcgtatgccgtgaatggccagtcccacctgtccgtcctgttgcgggatgagtgagagccttgcatccagtttggctgtcagcaaaccggaaagatggatggtcaggggcaccagtttgttggtcttgtagcccttcagcatggaatcaaggagtccctgctgttccagcgaagcctttgagattccgaccttttccaactcctcccagttgaccatgttctcattataccggtaacgcggtccttgcgactcctgcgctgcctgttgagcctggggctgctgctgttgctgtgccgcctgctgtacttcgctctgttgcaggggttcctgcggttgtgtctctttgtctgccatagctgttttttctttttggtttacactttgttccttcttgttttctctcggacggatttcgtagcgtttgaggaactctttcaccgcatccgtctgctttccctccgacaaatccctgatggcctgcttgttcaccttgtagtcgtggtaggtcatgcggagcaggcggaaatgggtaggttccttgagctggctccaaaaattcttgatgaagttttcgagaatactcgaattcttgtcgaatttcaggaatgagttttcattcttctcgtccgccggaaccgtcttcgcttttccgtccttgtcaatttcactgacagcctgtacaccgaatttcggatcgttcttgttatgaacaagcatcaattccgtaatctgttccaccggaagagcatcacttccggccttcggtttccgggtccgtttgggcttttcgttcgggatcttttcttgtgccataccttttcttttaggggttaatgaattgctttgacgcttcaaaggtatggggtatttccaaataatatgctgattttcaaaaaggtgtcatcagatgtcatcaaatgtcgtcagatgtcataaacatgactgttcccaacggctaaaccgtgaacggagaagaagggaagtgaataaacggaaagagagaagatacgtgaggcagaagggaaaaagcctgcgcatccgacaccagaaaagagcaggcgggcaggcaagacaaaaccatgcagaacagagggagctgaagccccctgtcttctcatgccttccgcttttttacagcaagactttcataagacctgtattccggctggatatgtggaatttcatggattatgaaatacggcctcttcaagcagcccatatcctttatccatgcgtcacatcggtcgcagtttgcccctgtaatcgtttttcaaatcgaatctggattgccgccgcattctttttcgtgaaaattttccacggcgaagccgcaaggaaaatttccacgaaaagattcggcaaatgcggccggcaagacaaattcgattttcctttgatgagggggaaaactgtatcgcaaacaaacctatctggaaattccgtgcaggctcattttcttgtaaagggtcgggcggctgattcccaacaaggccgctgcctgtgtcaggttccctttagagatggaaagagccgtcttgatctgttctatgtttcttctttcatctttctgcaaacacttgtctatcttctctttccccatggggtcagaaacgggctctcccgcatattggagccgtaaggaattgggggtaatcagttttcctttgcatatcaataccgccgcatgaatgacctgcttcagttcccgtacatttcccggccaactgtatcccagcagcatcttctttgccggttcgtcaaaatccaagacctctttccggagcaatccgcaagattgctcccggaaaaaatccgccaaaggcagtatatcctccaggcaattatgcaatgcaggtacggtgatggtaaaatcctgaaagcgataaagcaggtccttccggaaacgcttttccgcaacagcctcctgcaaatcctcattggtggccgcaatgatgcgcacatccatcagcctgtcccgttgtccgcctaccggacgataccgccgttcctccatggcacgcaacagcatccgctgcgtttctatcgaaaggttctccacctcatccatgaacagggtgcctccctgcgcttcctgaaaatatcctgccttttcctctgtggctccggtaaacgcccccttgacatggccgaaaaaggcggaaggtgccagctctttggacaaactgccgcaatcgaccgttacatacggcttgccggatctgaggctctgcctgtgaatcttttttgccaggtgttcctttcccgttccggtgcttcccaatatcagtaccgtcatatccgtcggcgctaccatgtgaatgtaccggttcaactcgcaaaaaggggtgcttttgcgttcatagattaccttggtgaaagcctcgttcaccgtccttatttttttgattacgggcagcagcctggtttcaaccagcggtttgaggatataatcttccgcacccagcttcatggtatgaaccgcagaatgtatctcttcataattagtcatcatgatgaacgggtgcatatagccgttctccctcatccactgcaacagcgtggtactttccccgtcaggcaatcttaaatccgccaatacgatgtcatcctcacggacggatgtcccaatgaccttcttagcctgtgccagcctgtaagtccttacagtatccaaatccgccttctgcaaaaaattgcagatataattacagaacaagacattgtcctcaacaacaattactctcataagctttcttagcctgttgtgccaaacatattatttcttttcctttttccaatacctgctgtacagtccgcccgaactcgtccacagaaaactctcccgaatcctgaagcagtgcgaacaactcatgcagcggcttgccggcatgaatgatctcccatgagcctgtcagatgatgtatccattctttcagtgcctcatgatcattcttttctgcacattcagccatagcctccatatccttcctggtctcccgaatcagggtatccagcatcttccgcctgttcccatatttcagcagggcatcgaggtctatctgttcagactgcctttcacttcccagacattccgtacatacctgcaaaagttcttcggcggaaaacggctttttcaaacagcccgaaaaccctgccgcatacaaatcccccgtatcgcagtttcccgatgcggtactcgcgataaccggaatgctccgtgaatttcccacattggccatgcgcaggagcttcaacacctcgaatccgtttgtccggggcattttcaaatccgtaatcaaaaggtcataactacggctgcggacatgctccatcagatcacgcgtgttctcacataccgtgcaagccaccccgtgatacgcaaacatttccctgattgccgccagcaaaacggtgtcattgtccaataccagtaccgtataggaccgtacggaaatccggctcctgccgctctccgccatcgcttcctctgccacagccaaaggaagacagacagtgaaccggctgcccacccctttccggcttgccacttcaatcctgccgtccaacaatccgaccagaccttttactattgaaagtcccagtccgaccccttcttccgcaatcgcattgggaagcctctcgaatgcagtgaaaatgcgtgtctgctcctcatcgtccattccggtgccggtatcttccacgataagcgtcaatacgccctggtcaaattgtgtgcgaaccgttacacttccccgctccgtaaacttgattgcattggacaacaagttgcttcctatctgtattatcctgtccctatctcctataacaaccgcatctccggcactcagcacgttcagcaaaaggttttttcctgccgccagcggcataaaatccgtttccaaaatctcggtgacggaacataacctgaacgggacaggaacggccttttccccgccactctccaaccggaaaaatcccaacagggaattcagcatggaagacatgtgtcccgccacctgccgtatgttccggctgtattccctgcacttcgacacttctctttccgtggaaagcaattccgcatagctgctgatagaagcaagcggcgcacgcaagtcatgggttacggccagcatgattttctttcttgcctcaatcagttcctcgttttcaagaacggtctgctccaactgacggactgtgccttccagcctttttttataacggtttatacgcatcatatcccggtgtatcaccatataggaccatatcagcagcaaaaccatgaatgccgtcagaccgatgaccgtggcaaatgaccgtttcccggcttccgcaacttcttcttcctgtctcttcaagtccgcttgtaccgttccatccatattctcaatcatctgccgcaactgcacattcagccttctgttcatcccatccaagctgtccgtccgttctgccagcttccgggcatacgcctgctgtctgccaaccacgctccgattaagctcatgaagcatggaggcggcagaaggagaatccgccctgtggcgttttgcgaacaacctcttcaggaatcccccttttggggcattttcccgttcactctgtctggcaatggccggaatcttcgctgcaatttcccggtcggcttcctcctgcctgtgtacccaatatatgatttcccgcatataccgctccttggctctccacaaattacggatgctgtctgtatgtgagccggaagaggagtacctcaagctacacaacaggctgtcaatgtgccgtctccgtttctgaaatgataaaaaatcctgctcactccactccataaaggtttcacagaagaaagaaagcctgagcattttcacgtatatatcatttatctcatgctttttccggttaatcatccgtacttccatttccctagccttagtctctttccattcgcagatgccaacgtaagcaataccacttatgactacaatcttggccatatatcctaccgctattttggcaagaagcggttgcaggcgcaaagatttcaacaatttattcctactttccaattattcactttttaattcattatattctattaaaattctttgcaaaataaaccgaccagtcggtttattttgcaaagataagccttttccaagaataatgaaaaaaaacaggttccagcaagtaaagttttatcatttatcagtctaaaagacaacggaatgaactgaaagggaggaaaaggaaaggaatgcgggcttaaatttctgagaacatccccaagaaagtcttaccaatagaagtgttcaatgcctgtctgctgaacgccttggcatccttcaaacttattttatgaccataagccacattggaaagaaagtcctgttcccggacaagaagttgctgatacatttgtggaaattcgtccatatattcatgggcggaggaaacaaactgcatataacatatcaggagattgccattcagatgttcgggaaaactgtttatcacccgttctatcggatttctgtattgccttaaaaactcattccaatccttgtcagccaaagaatacatttcacaagaaatctgcgagtcggggaaaaaacgcattctgacaaccgcatcaatcagtttctttttggaaggaaagtagtgtatgacagcccctttggatttatgcacggcaacagccacatcacagaatgaggtctgcttcattccttttgtgatgaataacctgtatgcctcctctataatccgctgtttcaaattcgggtccatcctactgcctatattataaaaaaatagcacagacgcaatcaacatccaaacatggtagtggaatacctagagacgaagtgacgcacctgtgctatatattttaatatagcgcaagctgtcatattccatcttgtctctttgaaattttccacttttcgtttggaagatgatatatgatactatactatgtcgttttaacagcgcaaaaatacgttatttatcgtttatttccaaatttatacgacacttaatagcactgttccataagaaaagcgtccgctttcagggacaagcagcagtattttttcaccggatttgagtttacgggtagaacagaactcatccaaggcagccagtattgctgacgatccgatatttcccacccaggtaagattggtaaaccactctcgtttgtacaattcaaaactctcgtttttcatcgcttcaatgagattaccataaataaccattgacgaagagtgaggtattacataatccacatcgtcaggagtcatgccatgtttattcagacatgatttaatatgtctaatccataacggcatcaacttcgtccctaaaagtttaatgtcctgtttaataaccataagggactcatcgaccaattcctgactttcaaaagatttccagcttttcagttcaccgtcctccctccggacagctccggcaaacatacaggtaggggtttcattggcatatgaatccatttctatccattcaatctttaaagatacgcccttttctcccggatgattttccaataatgcacaactcgcaccatcgcttaacataaagcgcaggaagtccttttccaaagccatatatggattggtgcccaaattgcagcatctttcatattcgatatcgaagtttttggataaaagcattgctgacaccaattcagatgtgctgcatattgcattctgtttttctgatgcagctatgctcaaataagctattttcagcgcttgcagacaagacagacaaactccagcagaagagaatatttcaacaggttcttcccaaagcccatgtaccatagacgcatgagaaggcagaatctgatcaggggtcgcagtagcacaagcaagcaactcaatgtccttttggctcttattggtcaatgccagcaacttacgtatagccagcatcgccatttctgcatttgtatgtgtgatttcttgatttttgtttaaggcatagtatcgccgtttaattccattttgctttaaaactatccgttgcactttggaatgttttccagaaatgagtcccaagaactcttccatttcatcattggaaacaggagagttcggaaagaagcttgcaagcccagtaataaaaacatctttcttcattagttcaatttttaattagttcatattgattataaagaactactttcagttcttctattcgcaatccattcaccaatgcatcctgaaaacattttccaaacagcaggattcgaaatgtcaaagccaatgtagaaggattaacatcggatcttatttcttttgtttcaacagccttcacaaatattctttcccataatttaatctccttatttgttatttcgttgaaagcctcgttaaatcccggatagaaatattctgcctgcaaaatcaagttaagatatgcacgtgtaatattggtcttctctttttctatgagatagatcctcattgcattcatcgtttcctccaccttctttatgtaataatcaataaattcaagcagagaggtgtgagaaatgtccttgaacttatttttggcatcttgtttgtgaaaaatgtaaaaatcaatcacatcaataaacagttcttgcttgcttggataatgatatgacatacatcctcttgataaattcagacttttttctatctccttcaggggaaccgtgttgtaatcttttgtcagaaactgtttgtatgcagcttccctgattaatctttttgtttctgagccttttactcctttcataaccttgttttttagtatcatacaaaagtaggtcttttgagtgaaaacacgttcatttttagtataattaaatatgtcctacccaattaccattaaatcatttatgaccatacataccagtttatgaaataaatgccaacgatgcctttttcttttttttcttatacatatattattttttgcttatatttgtcttcaaataagccgattagtcggtttgttcggcatagaggaacccaaacagaaagtggaatttcaaaacagagatgttcctctatgtctttgttattccatcttctggcaaccggattctatccctgttccaccatatccctaaaaaataccgaccggatggtattttttacggcaaaagtataaatatataccataaaaacaaagggaaaggccaattatgcattctatcggcaaagaaatgcctatgaaatatacataatccgcttttccctatgagaaacattatgttaccggcttatcttgaaggcatcttcatcttaacctgcaccccctgtgagtttaaaacacgaaccggtgtcttttctccggctttcaaatagaacagaatataatccttcgcacgctgggactcgaagaaacctttttcgcgatattcggcaatccacctctgaatcatcggaatctgccaacggttcatcaaaatatagtagccgaaataatactccaaatcgctcaggaaaatattgagtttcaagtaatcccaccagaactgttctttctttttgcttttggcattgagtatgataacctgatgttcataagtgtcacgaggattttcccaatcctgttgcgaaacaaatacatcgggaaccacattatcggcatgatcctttgccggaataaagggaaataaggattctattgaatcctttatctttccatataaggacggttcgtactccttgttgtacagcataacatcccgcaaacgggtggaagtgagatgggttaccacggaacgtcctaccacacaatgatccggaacagtcattaccgatgccagacgtttcataaatctgacttctgcttttgcctgttcttccttatccggtctcttgaaaggataatctgaccaggcaatcttccgcatcccccaatgcaggtctgtaagttgcaaccccgcataagcacagaaaatggaagcacgaattatcttgaagataggggtacggtcaccctcgtgggccacgtaaggcaggtcttccacgccaaaaagcatttcattttccgctatcaaatcggcagagaccgtcttgccttcttccaagcgtcccttaatcttgaagttacgcttttggtatccccaagtgtgaacaggtcgcgtagctatcagtgccacacaataattgccgttttgcggcatgaaatctacattttgcggtgttgcattgagcatcaactcgttcagcaacttaatcttttggatatagtccataaatcaacaggttttaagtgaaacattttgttaacagtgcaaatgtaggcatcaagtttcgtaccggagttccgtttttcgccgaaaatcactgcagggtcaaccaattattcaatatttattctgttctcgattctcagtatatagtttgtttccgagaaaaagcgttccatacgtactgcctgaccggttctgaacaaaggtttttcactattggctatgtaggctttttttatgggaaaattccgtgcctcttcctgttgttcaaaataaccaatggtagaacgcaactgctgttcgccgtcttttatccattgattacccttgccttttctttgtttcaactctacaaatataatcgtatctctataaaacaggcagccgtcgcagcggttgtccatactcccgtccgccctgcgcagttcaatgcaatggtcaaccggtacgaaattcacctttacctgaggataattgtccactgccgcaatccaatcctgcccctgtctttctgcaatatatgctttttcagcggcaggagccggccggtcgcatataccgaatttgcgtctgtttgatgatgatatatgttgtgtcgggaagaagtcaatcataattcctgttgtatttccaataaatcggcaaaatcttcgtttgttctctccagcatcctgttgaggaagttctcatcggaaggaagcccatgatatgtgtccagtactgttactgtcccttcgacctcgttgaactcgtaaatagcgatttcgtcagggtgtatggcagcttctatgggataaatagcatttatcctttcttgtacctcacaggaaagattacctacagccaacagcataccggctttgacagcgacggtcaggctattaataaggtatgggctatgtgttgtaactaccaaacggtttgtttccaaagcattgttaaaagccagcaactgtttcattatcatccattgcgattccggataaaggttttgttccggttcttctacaatgttgacaaatgccgatttgttgaatctggcagaaacggctgaaagggcaatcctccgttgctcgtccgtaaggttcggtatgttccatatattcgcaacttccgcttcgaagcgtttcgcttcatcgctgctcatcttctgggcactattcgcctgactttttacagattcggacaaatgtaaagaaaccaaataaagcggtacgatggattggaatccgctggacgcttccatcaacttcaccttatagtcctcacctttgacataaacaatgtcattttgtttgttatattccagttgcgcatgattgataggcagttccagactactcttaatgcgttgtttggctttgtcatattccgtaagaaaacctagcaaggcatccggcaaatccttaatcagattcggtttgttgaccatgctgatgaaattccgttcggcaggaacgtacatgatttgaggaagggcatagctgtccaatgcattctcattcttttctatgacaagttcgccttgcttcgtgtaggtaaacttgtaggaatccccttcgtagaaaatctcagtctgttcctttatgaaataattggaaatacgatggtaaccgcaatacttgttcttgaacttggcggcggtaaattctttctccttgaaatcaccccgtgtcaagaccttctccatccatgtaaaggtggaaaccagtttggcaaccgtacttttaccgctaccctggttacccgtaaaaacggttactttctttatatctatccatccgtccgttacagatgctgtttctttcaacggaccgaagtttttaatcttgattctactcatatatttattgtatagacctgttacaaagatagtgtttctaaatgaaacgacctaatgaatgttgtgtttcatttgcagtgaacatagaggtcttcccaattctttgtttttccaatttttaacctgtatgttttatgatggttttctaatagtcagaagtgtcattctgatatccgaatgtgtatcagtcggcattgaacggacggatttcggaaagattttcattgccgctgtcaataaagcggtcgagcaccttaatcatgacaacaggtatattctgcttccatagtatctgtgcgtccagctctgtacaaaccaatgccatctgtttcaattctttttccaagtatgctcccgaactgatatattcattcagaagaggtttgttttcggataatttgattacagaggcatataacttgtattgttcattgatacatttcaaatgaaacttgtcctttagtgtggaaggcggatcaagtaatttcagtttgggcaggtctgacttgttgagaataatcacagtatttgtaaattcgactgtatgatctccaggcagactatacaacaatctgttgtcaggggatttgaacttatactcgttttcctttcgtaaattctgaggataagcattgtaccagttgaagtggaatccgatgattatctgtttgtcggtcaatcttaaagtctggaaggccttgtcaagattctccggaaaaaccctatattcacttttaggctgatactggaagcttcggagccagcagtttttgaaagagtatagtgtagcagcactgaaagactccttaaaattgacatatcctattgttttatccgtacagaatgcctctgccggcatcagctgacgtattcttccgacacaattgaacttgttacagcttttgtactcatcatcagttatgacagaaacttctgtaatccacttcatttctctgccaatactatctgatgctatttggtaaaaatcctgaatttcatcttcagacagctgttgagtaactttttgatgttgtattgttgaagtaagcgaattggaaagggactccagtgcattcttcagcttatgtttagccctgtatatgcacgactgatccaatggcagtattgttgtgatgtcttccagtggaatggaattctgctcaatctgtttcaggataatcggaacattttccagccattcgttcttttcggataaggattcaggaagagccggcagtgaataaaaatcctcgtaaacataggtgcggttaagtgttgccagacgtaacattaggatatacaagtatttctgtatccagccattgatgatgctattgttgcgtacgccagcctgaagaccaaaaaatggatatttttgctcgtatttgtacattgaatcgggactgaatgagagcaagtccatatacagtggaataatttcagccagtgaacttggaatcagtacataatgagggggttggctattagtgtaatacaatatttgatttaaaagttcatattcttttctatataacaaaagtccacctaatgcgatatgaaactccttaaattctttccgttctttctgcctaagctctaccatttggctgtttgcaacagtttgtccagatgaagtgtagggaacgtttatacgttcatcaagttggaaagatgtaagatgaagaaacaagtgtgaatgggctgcaccccaatatttaagaatccattcgctgcgcttgtaaaacaattgctggttcaaacaagtccaaatcgtacggtaggtattctgatgcattatggtgaactgaaaatcatccagcattgcattgactatatcatttccgttcttgatggaaaccgcttccttttgttgcatgcacagctgctcattaatggagacaatgccttcgtataactccggcggatattccattaacgtccattgtttacctgcacgtaaagatatgatccagtcatacaattcctgatagcaatcgcgcaatacatccacattgttctgtttgagcatggcaataaaaagttcgaaccacgcttttctggtatcttgtgggatattgtttctttttatcaaatgcttttgcagcttttcaggtacattatagatatagataagcctgaaaatcataaatatactgaatgttagcagtacacagaatattgtcgcgagaataatggcagaataatctatgtactttgtaagaactccgaaatcaaaatagttaggtggagcgaccaattgatagaacagtaaaaatatggtaatagcgagcaagccaagaaaatgctttgtgcttctttcgttcataaagagttgtatcaggcgggtagattcatacttatcgtctatccgctgaataactccaattaacaagggaacggcaatgcccagtatggctgccgttataggtataataatttctttagaaaaaatgtccataatataaaaaatgttcaatagttgctatggtactggaggaaactttatgcgtccttctttatcgatggtacaagataaggcttccccttgaatttttttagctatacggttataatttgttgctgttcgtgtttttaaatctaccatttctttccaatcaaaggtatgctctatattaaaaacattctgttcatttgctgaagtaaatcgcatggatgattttacatggatattaccctcttgagaccggacattccagttaaatctgggatgatattgtaattttgcagcgaggcataatctttcgactgttgcctgaattatacctatagtcgtgtttaaatctttcagactttgggagtaataccatttgaattcatcatagatttggtaatccaagggattctcaaaaggttggaacaactggtaaattttgctcaaaaatgatgaatcatagtcatgtaaaaatgccggaacctcctgatccattaaaacacggcagcctttggccccagcctgttccaatttgacagccttacttacagcatttcctagcaacatttgtcccaaattagtgttgttatcttcaatgatatctccgtatgcaataccaccacgacatagaataccattttgcaaacaatcccacataatagtatgacatgaaagtatgacatctttcatgttttcagaccagacgaaagcgcaatcggacaactgggtgaaatttactgtagggtatttactctggcagtttgccaagattttccgaaaaatgatcaaaatattggctgcaaattcctgattccctgaagtctgaaaatgtttagagacctgccaaatattaaaatcgtcttctgtaagctggattttaccttgtgttaaagctgaaaatcctagtatatccacatagaagacaaaaccttttagattattcatgttcataatgttatcgtttataactggttgaattttttttggacattttgagctatactgatgaaacagttgggaattgtaacatattagttgttgcttgtcacaaagatagtatatctaagtgagatgagttaatgggggctttgttttatttttgattttgccaataaatggtatttcctaaaataattttgtatagttcttcatttttattgtaaaacaagttatattcttctttatgtttccatcttgaggctgttttgatgactttaatgagtttattattatcataaaagtattctatagttgaactatcaccataaatattaactccaacatatattgaattctcattatttactatttcaaattttgatatagatattaaattaattacgggtgtattttcattttctgttgggtaatatttgaaataggttttgttatatccatgtttagaatattcatataaactgatatataaaccttttcgtatatctgcatctatatgttgctctgaaataatcattttgttattttcatcgaagccaaatctgaacaagtcctgataattccatttttcaatggtcatgttttttaaaagtctaccttttttttctttattaagtaaatgataataaggtagtagattataatattccttggtcgaatattcccatctatgtacattttttaaatattcttttataagaagaatattattctttttttgtaaacttgttatttttaattttaaatctgttaacataattgtcgatatttaatataaattacttatgaattaatgggttgaattgttccatcttccactttctatttctgttccaattttttgtaattgttttctgacataattgtcttttaaattatcgcttaatttattgtctatcgcatatttctcagcactctctaataattcacatattcgtttatcactttcaagcgaatgtatgtaccctgcatggtaagtaccagtagttctggcagcttctcttcctggatgtccagattgagttacttgagaattagcagtaccccatagagcaactccattttcggcatcattaattcctatgtgacacctttccaatacggctttggatctgtttacatattcattattccgattcaattgaacaatatgatgtggagtctgtccagcagcaacaggcctataggcattttccatagctttttttaatttataagcatgagataagcctaaaatatcaagtgctatgttagtagaattaacatatctatatattgctaaaataccagattttaatcctataggatcttgactcatgtaactaccaattcttggttcataatacctaaaacggttgtagtataatcccgattcctcatccacatattgcccttgaaacctgaatggacaatcaaactccattcctttatttacagtaatcacttttccataaatatctagtgtacaatcccaagttttgtttcctttttcatcgtacatctgaataggtgtacccaaataatcggacacaatagaatattgcttaccatcctgtatctttgctgttggtacaaacgtgcctgcttcgaacacccaggtggtaacatcttctgccggttcttttggaaggatgttttcctcttcgtccgattgtaagccaacggctttatagctccattcgtgtaaaggtacgtttccgtcccacacccagcgtgtgacctttccgaaatactgtttggcggtgcgtcttcccaacgcatcgtaacggaactccaccggtcttccgtccggacgtataaccttctttagcataccattggaactccactcgtagagccatcccgtacctgtagccagacagcggacgccgcgctccttctccatgcgcttgcggtcataccttacgcccgtttcctgcaaccgtttgaactcacggaaaatgaggtttccttcgtcgtcgtagtgatagaaacaatccgggtcttccaacagttttcccccgggaccgtatttgcggtcttttttgtccggtgtctcaaagaggttgcccacgaagtccggtacgcggtaaatcacgtccgtttccgagccctggatggtttcctgccggataaggaagtcgaaacggtcgtagtcgtagcgcatgaccgttcccgtcagctcgttctccttggcgagcaaccgattagcgacgccccactcgtagcggtacgccccgcgctcgatgccgcccgcgcggacggacttgcgcacctcgcgcccgaaacagtcgcgctcggtgctgacggttacgccaccggagaaggtgcgctgcacctccagccccgtattgtcacgcacccacgatgcctgccagctctcgcctgcctgcatggtctgcaggttgccttcccggtcataagtgtgacgaatgtccgctcccagactgctggtgatgcgggtgcagttgccttcgctgtcataggtacggctgacggtgtattctccctgcctttcctctgtaaccagtcccgtcttcctgtcacgggtgaattccagcaggttctcgctgtgtttcgccctgacgagcatgccgtccttgtcatacgtgtagagggagacctccccgtcatactgttcctccttcaggatattgtccagtccgtcgtactggtattccgtccattttcctccgggacggttcacacgggtgacacgacccgcgccgtcgcgctcgtactcacgccgcagaccgtcgaagccggtttccgtaacgacctgtcccagcccgtccagctcgaagaaatagttgtcgcccacctcattgccgatgcgccggagctgcaactcgctgttgtagccgaatgtaatccagtgcctgtcctgctcgcggcttttcaacacccccagcgccccataggtgaacctgacctcgcggatgttgtcgctggcatgtaccatgtttcccatggcatcgtactcaaaccggtgcacgttgccgtccggttcttccagccgtatcaggttgtccgcccgattgtaggcataacgggtaacattgcctttcacatccaccgcctgcacaagccttcccctgccgtcgtactcccaccggcggaacagcccgttggggaactgcagcagctccaggtcgtacctgtcgttgaacgtgagcgtgtaaacccggccctgtccgtccgttatggtacgcaacacgcctccctcgtagacatatttcacagtttctccacccggtgtggtccggctgacgacccgatcctgtccgtcatagtcccatgaaagcctctttccgcacggagtgtagagcgagaccaggttgcggttgttgtcatagtccaggaaggtgtcctccccgttctcgtccgttatccggaccggcagtccgaactcgttgtaggaagtcttgcgggtatagccttcggggttgaccgttacctccagctcctgaaagctgttgtactggcggcgggtaattcccccgttggcatccactatcttgtagatgagtttgtcctcaccgtaataatattcggtttcggcattttccccattgcggatatgggtatatcccttaccgtaacggatgaaatattccatcacgcctccatcgccccatgtatgcacacagcgggcattctcacccttaccctcgtattcccaatggaaggacatacccccttggttggtaagctgtaccagcaggtgcccgccggaatagacgaaatgcttgctgacatccagcgcgtcaatggtttccaccatgtcgccccggtcatcgtaacggtagcggaccagcttcacctcctcaccgtcctgatttacggaaacgcagagcacccgccccgactcgtcggtttccactttcaggaattctccccgtgaggatatgattcctgccagccttccccccgaagcgtattcgaagcggagccggaatccgtccttcgtggaaatgcccgataccatgcggtaaccggagcggttttcgggaccgtcaaaacggtattgcaacccccggatgtccgtaagcatgtaaccccggccatcgagtgtccatgccagctgttccctgcggtcaaaatgggattctccaagtttcagcgcaggcaggaaggactcccgtccgtcagcatgacggaatgcgaacgccccttcctccaactgccgtattcccagattgtagctgtggtgccaattgtatcccaacggaccgtccacggcggcatcactgtaataggtacgttcccatacgacgggaatcggacccggaagctcgaagtccacattggtgtgatagaccctgcccgtagcagcgtccaccggctcaccgaatatgatgcaagctgttttcttgagaatcctggcaagccggggattcaatcccgccttgtctatcaatccatgcagcagatgggatatttttttcccgagctttgacaatcctttcagccccagcttcatcgccagcgcaaacacatcaatggtaggcggtcctcccacaagcacgggatttcctacggatgtgatggtggagagcatggaagtgggggcaagcagggccttgctcaccttcctgggcttccccttgcggggaatcgtcggtattcccacaatgttgcatgagagtgccggatgtgtgagggaggaacagggcgcaccgtccgccaggacagtggaactgcccatccacatctcggactcggacataccgctgaccaacggggccggatgcaatacaaatgccggcagatgcacgatgccgatacctgcctgcgcaatccactggttatgcaccttgaccgacggagccatgctcttgaggatgttgcacgccactccggccactccatcagccgcaggcggcatggcagccgccatgccggccatgaggtctgccatgaggtcgtacaccttgcctacatgaggcacaggcatgatgggagagggaggggtaacggtaggatgcatgtctatcccgatggacaggtcgccgaacttggcgacaggcatacccggcatggaaggaaggattccgcccagacccgcctgaatctcgtccaaagccgccttggaggctgaaaaaaggtcggcaaagccccgtctgacgctgctgctaccggcggcgtcagctatattcttgaacacatccggcataatgaaactttttgattcttgtttttaaaccgattggtcggtctgctttttgcaaatgtatcatttaaaatcaaaaaagaaaaacattctcctactattttctatcaaaaatcataagacaatccataaaaggcaattgatttcaagtcatgtatcaaaaaaacgtcgtatatttgcatctgttgaagaaaaaaggagagtaaatggactttgaaggagaatataccatacggacggcttccaaccagcagacatacgagccgaataccgtatatccggacgcagtgctaaatatagcccgcgaatcggcttccgtgttccaactgaagcggaaatgggaaaaaactcctccgatgctgaatctgacccctgattttcaacggggactggtatggaagaccaaacagaaaagcgagctgatagaatccatactgatgggtattcctctacctctgatttatgtgaaggaagatgagaagggagtgtatcttattgtagacggcaagcagcgtctgagcaccttgttcagttttatcaacaatgaatttgccttggacaaactcactatcctaaaggacaagaacggttcccgattcgcagatttgactccgttggagcagaataaaatagaggactgttcgcttaccttgcatgtgattaaggcacctaccagtgaccgggttacctttgacttgtttgaccgggtgaaccgtggcgggacgcggcttaacaatcaagagatgcgcaatgcgctctatcagggcaatgccacgaaactgatcaaccggctggccaagaaagaggtattcgttgaagctacagaaggttccattccagacaaccatatgaaagacaggtatctggtactccgttttacggctttttatttgtggcagcagcatatcaccatagacccggacacccatgagcctctggattaccgaagcaatgtagaggattttttggggaaaacgatgcgttttctcaatcagctggagccggaaaacggtttgtttaaagaactggatagccggtttacacgtgccatggagcttgccatacaactgcttccgtcaggcggcttcaggctgccttcgttacccggcaagaaacggccgataaacatggctttctttgagagtttcagttatcttctgtcaagattgaacggagaaggggaacaattccatcgtcaggttcaggatacttatatgcaattaatgtgcaatgatgcctatctggattctctcacacgctccgtggatagcggaaagcagacctataagcgttatgaaattatcaaccgacttattcatgaactgaatttatgctaaacaatctgactgtcaacaattataaatgcctggtggaatgttcgttggaattaaaacctctgaacctgttcgcaggtccgaattcatcgggaaaatctaccgccctgcaagccttgctgattgcttcggataacgtgacggagcaaaaaggcaaacacggtctgaagaaccggagaacagaagcgtcgaatttcaatgatgtaaggaactttgtgaccaatgccaagtcatacgaaatctgtatttcgtatcatggagaagatccgacccggctttgttttactccgggcgatgactcattccaaaccacttttgtggaacaatcggctgacgcatctccgaacctgctgggagttctcggaagcgagaacctgctgtacctgcctgccacacgccccggtggggcatatatgcatcccgttaatcccgattcggaaaacaagctggggcgtaacggggaatttgtgatagactattacgccaagcaccgtctggatacgctggatgccgcattgatcctggctcccggcactcaaaccctggaaggtcaggtgaattatcaactggacaggctgaccggttaccggctggtggtggaaacagtaggaagcaatcattacgtaaaatatgaaacgcgcagcggcaaacagcttctcccttaccatgtcggtaccggagtaagctttatgacggaagtcatcatagcttgtttcgcgaccccgaaaggcggcatggtgattacggagaatccagaaatccatctgcaccccaaggcacaagccgacctgattgatttcatggcaaagatagcgaaagccggtgtgcaaatcatcatagagagccatagcgaccacctgtttaacggtatccggcgcctgatcagtcaggaaaagttggccttgtctgacgttgccgtgtacaacttcagacaagacgggaatggattgacccatgccgaacctgtggaatttaccccacagggaggaatccaatcctatattcccggcatgtttgagcagtttgatattgatttggatgccattttaaagctataagactctatggacggtatcattatcaatgaattgtcattgaacggacagtttttggacagccgggatttctggaaaaacggaatgcctccgtttcacaaggcattgcaggatgccctttcacatggagtgggatatctgttcaaacaaggaagtttttttgctgcgcaagccactcccgacaagactttacacgatttgctgacagcaccggaaacccgtatcatcgatgaagccaggctgtataaaagtacattggcacgtgccatctgtaatccgttttgggatgaagctccccaacaggattccaatgcccaatattcagtaggtgaaaccgatgtatccggcagttcagttgccgaagcagcagcccgctcggtttgtcttctatcatttattagatccaggtatgagaagcatctggttgccgtaaccaaagatgaagaaccaatcgaggttggtaatatctggaaagagaagcaattgtactctatcttgtttgaaaggggtgaactatctctcgaaaagtatattaccattcgtttcagtggaggcaagcttgatttcagccttattgatgacacgctgggtttttcccttattgacggcgagaatcagaacgaatttattgattcattccataaatttgaggagttggactggagtgccattgctacagataatggattggattataaaccgtataacaagaacaagaaaagcaagcgctatttttcggatgacctatggaagaaaggcattaaaaagttcagaatcactcagcggaacaggtgtttcggctatgtggagaatggtgttttttatgtgttgaggtttgatttggaccatgagctaagcgatgttggataatgtttatagccccttggccttatttttataaaaatagaaagctgtgcaaatttataagattggcatcttgcttatctccatatactttcagtcggaaattcaagaattacaaatcctaatacttataaccggcggatttataatccgccgggacgggtcttgtaacttaacaataaaggtagtgttccaataattaatatgtaatacatttgttttgatactacctgctattgtactaaaaaattaagaatactcccaatatgcaacaaaaagattttcaatattttcattttctattttaccatatacatatatacttccactcataaattctgagatgcctctcattccaatttcgttgatttgaaaaatgaaatcatatccatcttttgttacttttccatcattatccaatccccattgtattggtatagcttttcctccaaatttgataacattatttttttctggcccatctctgtcttctcctatttcatataaggaataaatatcatcaatttcgggatgtttaaatttagtacaattactctgttcgcttatttcatgttcaattagtaatactttgcaattaggatatgaattgtattctaaggaagtatcaaaatctggagtaaaaatagagtattgtctttctttatttaatgggctttgcagggttaagtagaaataatatttttccatattagggaaagaaatattatctaatattttaggagcattacccccaacccaactattacagttttctttatattcacatatatcataatataaagcgtcttctctagtctttaatatcttttttatgttcataactattttatgatttacatgttattaaattatttgctttagcatgtgctattgcatcctgtctgagtttctcgactaatgcggttgctttttctttcgcagtttttctatccatgccatcagctattaacccttccattattcctctacgtgttaaagctgcatttttgtttatattttctagtgcagattgtcctttcaagtttttacctttcatcccatatctattttgaagagcggtaattctattgtgtatacccttttctcttaatgcaatagaagggttttctttagaaattaaatcaactcctctatttttacttgtgggaagtttattgttctgttcaagccatgcgtgttgaaggagttcgtgtgctgttaaattgtcaccaatattcgccctactgctaatattgccataagtatcgatgtcaaattctttggctacaagtccaaaaatatcaatacaaagattgacatttttgacatagctataaaatctttcacctgcacttagtccaatagggtcttgacttatataattaccaatttctggttcgtagtacctaaagcggttgtagcataatttagtttctttatccacatactgcccttgatagcggaaaggacaatcaaattctgttcccttatcaatggcaagcacttttccatagatatccagtgtacagtcccatgtcttgtttccttgttcgtcgtacatttggatgggggtacccaagtagtcggacacaatggaatattgtttaccttcttgtatcttagctgtaggaacaaaagttccttcttcaaatacccaagtggtaatgttttcaatcggctctttctgaaaggattctcctttttcatctggttgtatttctgtagttttgtatctccattcatgtataggcacgtttccatcccatatccaacgtgtgaccttcccgaagtattgctttgccgtgcggcgccccaacgcatcataccggaattccaccggccttccgtccggacgtatgaccttcttcagcatgccgttggaagcccattcgtaaagccatcccgttcccgttgccagaaaatggataccccgttccttctccatacgtttgcggtcgaaccttacacccgtttcctgcaaatgcttgaactctctgaaaatgaggttcccctcatcatcgtagtgatagaaacaatccgggtcttccaaaagttttcccccggcaccgtatttgcggtctttcttatccggtgtctcaaagaggttacccacgaagtccggcacacggtaaatcacatccgtttccgaaccttgggtggtttcctgccggataaggaagtcgaaacggtcatagtcgtagcgaatgaccgttcccgtcagctcgttttccttggagagcaggcggttggcgattccccattggtagcggtaagcccctttctctatgccgcctgaccgtaccgacttgcgtatctccctgccgaaacagtcgcgttccgtcttgacagtcacaccgccggagaaacttcgctgcacctccagcccggtattgtcacgtacccaggatgcctgccagctttcacctgcctgcatggtctgcaggttgccttcccggtcataggtatggcggatgtccgctcccagactgctggtgatgcgggtgcagttgccttcgctgtcataggtgcggctgacagtgtattctccctgcctttcctctgtaaccagtcccgtcttcctgtcacgggtgaactccagcaggttctcgctgttcttcgccttgacgagcatgccgtccttgtcatacgtgtagagggagacttccccgtcatactgttcctccttcaggatattgtccagtccatcatactggtattccgtccattttcctccgggacggttcacacgggtgacacgacccgccccgtcgcgctcgtactcacgccgcagaccgtcgaagccggtttccgcaacgacctgtcccagcccgtccagctcgaagaaatagttgtcgcccgcctcgttgccgatgcgccggagctgcaactcgctgttgtagccgaaggtgatgtggtgccgttcctgctcgcggcttttcagtacccccagtgccccataggtgaacctgacctcgcggatgttgtcgctggcatgtaccatgttccccatggcatcgtactcaaaccggtgcacgttgccgtccggctcttccagccgtatcaggttgtccgcacggtcgtaggcataacgggtaacattgcctttcacatccaccgcctgtacaagccttcccctgccgtcgtactcccaccggcggaacagtccgttggggaactgcatcagttccagatcgtacctgtcgttgaacgtgagcgtgtaaacccgtccctgcccgtccgttatggtgcgcagcacgcctccctcgtaggcatatttcacagtctctccgcccggtgtggtccggctgacgacccgatcctgtccgtcatagtcccatgaaagcctttttccacccggagtgtagagcgagacgaggttgcgattgccgtcgtagtccaggaaggtgtcctccccgttctcgtccgtaatccggaccggctggccgaactcgttgtaggcagtcttacgggtatagccttcgggattgaccgtgacctccaactcctgaaagctgttgtattggtgacgggtaattcctccgttggcatccactatcttgtagatgagtttgtcctcaccgtaataatattcggtttcggcattttccccgttacgaatatgggtatatcccttgccgtaacggatgaaatattccatcacgcctccatcgccccatgtatgcacacagcgggcattctcacccttaccctcgtattcccaatggaaggacatacccccttggttggtaagctgtaccagcaggtgtccgccggaatagacgaaatgtttgctgacatccagcgcgtcaatggtttccaccatgtcgccccggtcatcgtaacggtagcggaccagcttcacctcctcaccgtcctgatttacggaaacgcagagcacccgccccgactcgtcggtttccactttcaggaattctccccgtgaggatatgattcctgccagccttccccccgaagcgtattcgaagcggagccggaatccgtccttcgtggaaatgcccgataccatgcggtaaccggagcggttttcaggaccgtcaaaacggtattgcaacccccggatgtccgtaagcaggtaaccccggccatcgagtgtccaagacaactgttccttgcggtcaaaataggaatctccgggtttcagtacgggcaggaaagactcccgtccgtcagcatggcggaatgcgaacgccccttcctccagctgccgtattcccagattgtagctgtggtgccagttgtatcccaacggaccgtccacggcggcatcactgtaataggtacgttcccatacgacgggaatcggccccggaagctcaaagtccacattggtgtgatagaccctgcccgtagcagcgtccaccggctcgccgaaagtcttgcacttgatgggctggagaatgtccgccagcctgttcatgccttttttcctcagcctgtcgattaggttttggaagcggtcgcctatcttcttccacatcttgcccaagcctttcagtccgaacttcatcgccagcgcaaatacatcaatggtaggcggtcctcccacaagcacgggatttcctacggatgtgatggtggagagcatggaagtgggggcaagcagggccttgctcaccttcctgggcttccccttgcggggaatcgtcggtattcccacaatgttgcatgagagtgccggatgtgtgagggaggaacagggcgcaccgtccgccaggacagtggaactgcccatccacatctcggactcggacataccgctgaccaacggggccggatgcaatacaaatgccggcagatgcacgatgccgatacctgcctgcgcaatccactggttatgcaccttgaccgacggagccatgctcttgaggatgttgcacgccactccggccactccatcagccgcaggcggcatggcagccgccatgccggccatgaggtctgccatgaggtcgtacaccttgcctacatgaggcacaggcatgatgggagagggaggggtaacggtaggatgcatgtctatcccgatggacaggtcgccgaacttggcgacaggcatacccggcatggaaggaaggattccgcccagacccgcctgaatctcgtccaaagccgccttggaggctgaaaaaaggtcggcaaagccccgtctgacgctgctgctaccggcggcgtcagctatattcttgaacacatctgacatggtgagaattttttagaatgtgaaaaagagacaaccgggtgttccaaccggcacactccggctgtccctgtaaggacttacctatgcatcctgtgcatagtcgctgttccagtcgttctcgtcatccccttttgtaccttccaacttgatgacaaaactctttgccgggaaataaggagtcaggtgaatgtcgaggaaaatacggtctttctgcttcggatcgcgctcgaaacgaagaatcttgaatttctcaatcaagcgtccgggaccctgtatgctatccaaaaacttgctgatctgaccacgcaaatccctttccgccttgctgttccagttctcaaaggcacggcggttgaggaaatccatcagcactttcgttacccaatcgaacacacggactacggaataggtctgcaatcccaagttgtccccgttgaacaatgtcttggcagagaaagccatcaccttgccgtattccttcaccatcggaatcaggccaatcttctcgatttcggaaatctcgctttttttcaggttgaaagcaaccccgtccacctcgctcatggaaccatacttcttaccggcggtaacctgtgccattaccgtcttgtacacactgccggccaatgccgcagaaggaggaatcagcaagtcttcggtttcgcccagttccgcatagcgtccccgtcctaccagatagttgcaggtcatacatacgttggacttgtacacatcgcctcccgaaagattggaatcaaagaacatttcaatgacatcatccggtttttccagatcagcgaaatccgtgtaaatcatcaccttgttgtcatgcgcaatctttgcccatttttcaacaaccttgttggaacccaaatatcccgggataaccagcagggaatagttggtacgcaagtccaaacggtcataattcgcacgaagctcgttagcaatggcatcgataaagaaggagttgtccaaatcggtaagctggctcatcgaagcgttcacaatggagatattcttgatcttgtcggaatccgtattcttgtagaagagcatgaccgtgcggtaggacttctccaactgcctgacctcttccaccgctttcagctggttctgggatagcagaccggacaccgccgcagacttcttctggcacagttccaccatctcgctgatggatttgttgcctttcaacatatcgacccacatctcaagccgtttttccagttccttgcgctcagccgcccgttcggggtcggaaaggaatatgttccgccgtgccttgcgctccggattcatgttctgtatgccgtccacggaagattccaagacattgaaaccgccaaacttagccagaatctgcaattcagcgttcagatttctggactgcgccacagcctgttgctgctgtacggctgcttctctttgtgtattctgttcgctcataactatcattcattagtggggttagacttctcattgttcttcaaatcgtccaaaatggcagaaatcgcattgacaaacgctccacgtgtctccggattttccagcacccgttgcagcaccttgttggaacgcaacgacttctccatcctgtccgcaaactgcttttccgcattcaggccggacaagaatgaactctgttccgtcattttcctgacagaaaaatcaccgacattgtggaaacggaaattttcctctacgggagcaccgtccgcatccgcgaactcgatatctatttccggccggaaatgtgcaaagacttcgtcaatgttggtcagaccggcaaccacttcgggagccaccggctcatccttcgtcagctgttccaccaataaggttcgattttgtggaatttccgcaataccttcggaagcgtcaatcttcacttcgtttccgccgattccataattaccaagatccatacttattcaattttaaatttaaaatatatattaattaaatctcgctcaactgaaaaaacttccccttcttctggccttcgcctgctgcatatccggattgtccaccagttccttccaatcctccccaatccattcgcagagctgccgttccaatatcccgacatcaatcggagcacgaaccagccttcctgtatgaagagccagatacgccgcataaacgaacgtggaactccgcctgatttcggcagaaaggtagctgcctcctgccagggcaagcaaaaaatattcgaaagcctgttccatctttccatcctcatagcgcaggaaaccacacatgcgatagccttccatgacataataagggtccttttgcatgacggcttttttagccatcatgtcatacaaggcaaccgcttcctcccgttttttcccggctgtcagaatggccgctttcatggaaacagccattttccaataactatatcctgccgtttcaccgccctgcatcgccttttccgcctcccggacggtttcgtcgctgtatttcatgctatgcttatattccctgatagcataacatgcctcggatgcgataagcagagcggaaatccggatattcgtatcctttatttcctgtgcaatatccaacagttttcggatttctctgtccaataatttccaatcctgcttttgtgtagaatccatgacaaccgtaacctgctgcttgaaccgattttcaggtgcaatcaggtcgttaccgctatccgaccgtgccatccggttatgcaaagccgccgccatatcgaactgcgggcgtatgcaaaccacttcccgagactcacccagccggatactcctgttctttttcaagtcaatggttgtcatccggattccctgcgggacaccttctttcagcacattgccgaaccatcctgtccgggaataccccctttcctgttccggaggaaagtacagacagaaaaaggcatcatccaaccgggagatacatgccttgaaacgcaacatctctctccacaagttgcccgccgtatgctcaaccgacacatcaggaatgtattcttccttcagcagcccgtcgtgcctcagagccctgagaatatcatacttctcctcaaccttttctgaaaaccaacccgcatattcctgccagagctgttcagtgtattcctcgtcatcccccctgtacggcgtatcaaaacgaaagaatatgtcatcgaactgccctaccggagaacgttctatttccagaaacctgtccaccaagtccacatcattctgcccgacaatccatacagacagtttccagtccctgttgccgactatgtccgcccagtaatcgactgctttgtaatattcctgtatcacagatgcagatgctcccatagccaaccgaattatgagttaaactttactattcctcccgaaaccgttacgtttccctttccctctatcatcagatttacaccgttgaccgttccgttctttgcagcaacatcgtaatcctttgccgcctcctgtttgatattggtaccgctgctgctaattatactcttttcgctgctgagcaccatacattcgttgccggacagcaatgttacacttttcctgccttcgagagcaatggtatcggcctgcaagcctatcgacttatcatccattacgatgaccgattccgcctcgttggtaagggtaatgcttcttttcgccatgacggtaatggcatccgtgccatccaatatgatcagctgttttcccgtctggtcggtaataacgatgcttcccgtctcatcgtcgaaaacgatggcattgccgctgcgtgtgataatgctcttgaccttgttgtccttgtcccctcctttacctgaaccggaatggaacaccgatcccgtaacataggggcggtccgggttgccatgctcgtagcttaccataacctgatcgccgacttccggaacaaatacccatccgcgattcttggaaaccgcaccacttactcccgcattaggagtctgcaccctgatccaattggttgtcttgccgtttttctgccagtcgaaagccactttcacacgtccctgtcccttgtcgtcgttgttttccttcaccgtagccagttccggcaacgccaacggtcgcttcacatcgggaacaggaatatgtaccgtaccgtccggcacaccgacaaaactattggagtaatgtccgtcacggcgtacctcatgctcaatcccgacaatacggaacttgcctaaaggaggcagtttcatcctgtcagggaaagaaacatcgatgatttcaccaatccttatccggcaagtctttcctatgcctttgatgttcagaagattggcaccagacgcattctttacaatcctcatctgttcgtccagttccgccttgtccgttacatgggggtcggcagccgaggtcgtttttgcagtatatgccttctcagagcagctgtgtgcaatagactgaaggtcgttcatgccatccggtttggcaggcgtatccgcattatgctgtttgttctcctgcgctacataatcgtatcttgcggatttacccggtaccagattggcaaccagacgtacctcctccaaatccatgtcataaacaatcttctccgtattgtccctgtcaggcttgccgaaatacactttcgtcccgtcataatagaaccactccccataaagagccgaaaggcgattcataaagtcaaagacactctcgttatactgcgccatgtagggtatgggcgccgcatacttgggattggaaaccaaattgacctttccatactcctgcgtcacctcctttattatggtagagagggactgatccatccaagaatcgagtgtcctgttgttctcatacagtatcgtagggcttgttccgtgaatggccactccgcctgtctcgcccatgcttccaaccatttccacttgagtgatgattccctcgaagtcataactttcacccgtctgcctatggacaaatgaaatgctggctgtctccccgatgtagccgatgaatttttccggggtctgttggaacgtattgttaggcgacagataattcaccaccacagtgaaggtgtgatgccggttgaaaccctgacggagatgcagtgaaacgaatttctgttcttctcctttcacggttactttagtagccaccaaattcagaaaacttgctcccatactatcttaaactatgattttaaataaataatccgactggtcggtatgttttttggtgccgaaataaccggaattggtatattccggcaccttaaaactttgattaggaaacaaccattagttgttttccggccaatcctgtacaaatgtagcctcgtccatcttcacggtctgtgcagaaatggcgaacttgattgtcatcggataagggttagccacattcagtgcctcttcgtaatccaccacataaccattttcgaacaccaattccttcattttggcatcttcatccgctttcttgaagacgatgtttccgtttacgggctggtactgcttgaacatcttatccagcacaatggtatcgggagttgattcgatttccacatagattgtgccaccataaatgtcagatgccggacggcctttggggtccacatcacgattgaacttaactctccaggtcagtacatcaaactctcttgagtccgaaaacttaaatgacgctttaaatgccatattctcaaagttttaaattaaaaaataagttgattttgaaatatccggtcaaaggaggcctgctacagtcctatctttgtccttcaatttctgcgcccaatatatggcattttctgaaaactacaaagaacttttgatgattttttcttgtttttgccgaaaatatgcccataagcataaaaaaaacactgccaacaatagccgaattattttttttgccttatatttgcaatgttctcctgcgcaatttttaaatcttacgattatggaaacaggagttggtttcatcaatcttgatgattctgtaaaaattgcgcttaacatagcacttgcagtggctcgtgaaaatgcgaacgagtgttatacaccctcgcatttgttgaaggctctacttcataaagatgtagggttaagagattttataataagtataggcaaggatttaggctatctggaggaatgggcggacgtgtatatcgaacaatgcccgaaatccacccagttgtccgaaatcaagccttcggaacggattgacgccgttttccgtgccgcagacgatgcacgaatccagttcgggctgttcgacatcaatcccatctgtgtgctattggcactggcaaagcccggtgtcgctttttccagcgaccagctcaggtctttccccattctggaaaaggatatccattccatatatataggtaacgggcagccggcatgtccttctgccactacggagaagtcctatgccccgacttccgcctcatcctccttcttgggcaaatactgtgtggatctaaccgaagatgcggccaacaagctgcatccggtcatcaaccgcgaccgtgaaaaccgtatggtcatggagatactgggaagccggagcaagtccaatgtcctgattgtcggtgatgccggagtaggaaagacagcactggtttacggacttgcctgggagatagtcagccataaagtgccctcgtttctggaagaaacccgtgtatttgaactggacaacgcctccctgattgcgggagccacctacaagggggaaatcgaggaccgcctgaaaaacatcctgaaagaattgcggaatatcgacaatgcaatcctgtttattgacgaaatccatgtattgctggacaaccgacaaggaaataccggtgcgggaaatgtattgaaatccgaactgtcgcacggcgacctgaccgtcatcggcgccaccaccattgacgaataccgcaaaatcatcgagccggaccatgctttcagccgccgtttcgaggtcatacaggtaagcgaaccggacataaagtccgctatccagatgctacactccgtgcagaaacaatacgtggactaccatcatgtaagaatcagcaacgaagccgtagccgaatgtgtccgtcttgccaaacggtatatcaaagaccgccgtctgcctgattccgccatcggtctgctggacatgacgctctccgccatcaagatggtcaatgaaacaggaaagaagaatgtggagaccctgctatccgggctggatgaaatagaaaaggacgaaaaggaccttcaggaaaagaccgaagaactgaaaacgctgcttttcgtaatgcacaacaaattaagccccatccttttaggagtcatacccgatgaagcggatatccatgaattgcaggagtatgaagaactgaccggctatctgagaaacgcattgaacgtcctcctccaatttgcagagaagaaaatagaggaggtgggtatctatgaggtagccgccgttgtcgccagcaagacaggcatccctatcggcaagatacagtcgcaggaaaaggaacggctactcaatatggaagattatctgaggcgacgcgtcgtcggacaggaccaggccctgaagacattgacggatgccatcctggaatcccgtagcggcatgaacaagccgggacagcccatcggctccttcttcctgctgggacccaccggtaccggcaagaccgaacttgccaaagcactggcggaagccctgttcaatgacgagaaatccatgatccgtttcgacatgtccgagttcaaggaagaacactccgccgccctgctgtacggagcgcctccgggatatgtgggatatgaggaaggcggcatgctggtcaataaaatacggcaacagccatacgccgttgtcctttttgatgaaatagagaaagcgcacccgtccgtatatgacattttcctgcaaatcatggacgagggaaaactgcatgaccgtctgggcaaggaaggggatttctccaactccatcgtgctgttcacatccaatgtaggaagcgagtggctgaccaagcaacttgagtccggcaatgttccgtccaccacccagatcatggaggtgatggggcagtatttccgtccggagtttctggcacgcctgtctgaaatcgttccgttctcccccatccgcgaagacatactcctgaaaatattcgacatacagttcaacggagtcagaaaacttctggacaagcagggtatcggcataaccatcaccgatgatgcccgtaagatgcttgcacacaaaggattcacacccaaatacggtgcccgccaagtggccggtgtaatccgtaactatctgcgcagaccgatttcacggcttatcatcaacgaggagctgggcaaaggaaaaagtctggaggtaggtctggacgaacagaatgaattaacctggaatattcaccaataatcaagtacactatgtttggatataccgtattcttaaagataggcaacctggctgcctcctcactgaccgacatgtacaaggacagctaccagctcatcggttgcgaattcggatttgcccaagggatagatatcaaaggacaggcacagaccgaggtaaaaggcggcacgttttatgtaacctaccctcatcttcccaaccgtgacatgatccagtggatgctggatgcccgtaaataccagagcggagccatcgtagtccatgacaaccaaggctccacactcgaaaagatactctttgagaaagcgacctgtgtggatatggaaatcagctatatccggcagggcaaaagctatattgcgaccaaactgaccgtacaggcacagaaactggcattcggtacagaagagtttgaaaatcagtgggtgttttaaaaacagcagcgttatgggactttttaattttccgcaagtggacagcaacgtgaatgtcatattcagcgttgacggcgacgaatatgcagtggaacagttcaaaataggttttcaccagccagtagataacctaaagaaccaaccggaaggcgaagtgcgtggaggacgaatcatgataaccctttcgcagacggtgaaaagcaacatctacggatgggctgtgaaaccgtgggtgaaaaagaacggggcagttctgttcaagactggaacgtccggaatcgtgtttgaggtggcgtttacgaatgcatattgtgtcaatctgagacgggttatagaggctttgggacaaggattgtcaacaagtctgattctatctccagagagtgtaagcgtgaatggtattgaatttgataatcggtgggtaaagtaatgggcgatattctgaataatagaataataactctagaggattttgagtttctaaaatcaataggagttccatatacaggttatgtcaagggtattggatatacctgtcctgtgtatatgccagcacaggctttcaggattacagatggtaatgtgcaatggagcagttgtgagttacaccctcttttttatcaagctatagatgatagtccagagcgcatctttttgagcatgggatacactactgaagatataattgaaagaataacttatgataatggtaatggaaccataactgttgctgtgggaaaccggtctgtaacttttccaaaagaacaaggtaaggttaatgtgtatttgaatcaggaaggtggtaattattttatttatatagaagctacagattcaaaaggaaatattcttttgagtgattcaaaaacgattcgttcttatatacatgagaaaggaattaaacaagattttgacattacagatggagtgggctttaataaggaaattcttgataatattaatacaggaattggagcttttggtattgggttaggtgcgaaaactgaaataatagattatggaataagaagttttcatggttattcttggaagcagtttaattcactcgataaaaagcagcagttacttaaagaggctcaagcaattggaaaaaccgggactaaatatttaaaaggtatgaaaatgcttggaaactggagttcgtatgcttctgctggttattctgtttccttaatatttgtagaagatggaagaacattggaaaagaaatttgttaaagcagcattagatgtgggatttacctatataggtatattgggaccatggggatttgctattagttctatttactatttggtggatacagctacagatggctttggatattttaatgaataaagttatgcataaaatcttagaatatttgttttataaaattcaagtattgactcgatatatggacacaagtatgtatttaaatatacatgttccatttattatgtctacagtcttattattctatttggcagatattgcaattatatactattatattataatgggatattcaccacaaaaaaatccaagtaatgtgtttttggtggttttcattattatgattttattatggagtagtctctatttttattatcggtataaacatagaaatgaacgaattatggaaagaaaaatttatgaacatagttctaatgtatgggcatatcttttcatatttactccttttattgtattattaggatttgctttattttttagggtgtccagttctacgctctcgtttttggtattgatttaacaacttaagatattgattattaactataacactattgtttttaggtacaattttaacatacaaaaaagcatagctaattcattgaatcaatatattttaaagagatatgattatcagcactttggaacttgcatcatatcttttttgaactaaaagctggaacatcaaactggacaccctatttatttttttaatttcattgtttatgaaagagtataaggtattaataatttatacaatctccaatgatcaatcaaaaaagtcatttgaagaagaactggagagatacggtctggaacgggtcgggacgcaagatatctttgcccttcccttagaggaataccggacaaaggtacaggcattcaaagcctacctgcgagcctatgtacgcaagcatctggacagccaagacacggtactgttcgttgaatcacgcatgaacgaggaacggaccctgaccgccatgctgcaaaccaatctgatgagtgaagaagaataaaataacataaggatatgagtgcacaatcgtatatcaagttctggacagccgaaccctcggagcatgaagaagtgcaggcatacgacctgctgggctacgagtatgacttccggaaagaaaccactcctaacggaaaggtaaccgggaagacctacggcggtaaaatacgggtaagcattgccggatttcctacagaggaactcttggaatggatgttcaattcaagaatcctgaaggacggagaggtgatgaacacttccggcctgcccggtactcccaaagagatcatccgtttcaagggagcaaaatgccttgatttcaatgtgcattcaacaaccaaagagagccgtacctcactattcatccacttccgggaaatggagaccggcgattcgtgtcacttaaacttataatcatgaactggttcacttcattgttcagaaacaaaaaatcctcaatgccggatgaccgctacgtgatgcggctgtccgtctgccatgagacatacagcattgaagagttcgacctgcaattcaagcggaatacagaccgtgacggattgcctgaaggtgaggcatacggcggattcgtcacctgtaccctcagcgggatgccgggtgacgagctgttgagatgggccgcatacagccactcccatgaagacggcgaaatacggatctacctgaaggagcaacccgaccaacaagcggcatttgccttgcgctttgtggaagggaactgcatccgtctgcaacgcaaggttgaccgtatctccaattccagcagcatcgtccttctgtttgccgcaagaacactaaaattcatagacgaagaatttgaaaacgaatggcactgacaagtatggaaacaaagttttgcaaattgcccctggattttgaagccttgctcagcgaggatgtggaaaacagccgtcttgcatcctgctcggaaatcgagtccatcgaccagtttatcgaactgctgatcagtacggctcccggcgaacatgcctttgacaaggagttcggctgtgagatcttttttctcgactttgaaagcattgtctcacacacccgttgggaaggacaattctcggaatacataaccaaggcaattacccggcacgagaagcggcttacgggtgtaaatgtacgtgtcatcattgatgacaccacccgacaggacaatgtatttgatgctcccgccgtaaagaaacgtgtacaagtatatgtatatggaaccctggtacataccggagaaaaacggtgtttctattatgtaatctatttaggaccgatttcaacccgatgaaaggattatgagtacagaaaaatacaataaagagcaaatcagaaaccgtatgctgaaatacgctgcggctttctggggaataaaaaaggcggaaaacttcgacccggttgtcaagctcctgctggaagcattgtccaacgagatatatatgctgggagaggattttaccgccatcgagacaaggctgctggaaaagaccgcccgaatccttaccccggacatccttacctcaccctttcccgcacacggcatcgtacacgcctatcccatagaaccgtgttacctgataacccgggaatcgggcatgtattacgagagcgactcgcttacccggaagctatcgaccggaagcgtatcgttttatcccgcctgcgataccctgctgcacaaagccgacgtgaaatatatggtctgcgacgaccttctctaccggatagcccctaccttggagaagaccatgattgcccgtgcagagacaaggatgtctccgcgtaccgtctggttaggaatggcggtggatgaatccatttccgaccttgaagacttttcgttctatctagattttcccaaccttacggagagctatgaatatctgctcctgctcccctgtacggaatggtccgtagaagggaagacagtcgtgatggaagggggaatccatgaaaagacaaccatacagaaagaaccaacccgtgcctttttccaagactatgacgtaatgtccgtcatagacaaggaagtcatggatatttacagcaaacattttctgaaggtatcgcagtcctttccactcgacggttcctgcaggaaaaaccttccggacaccctgcggtcctgtttcaaagaggccgttctggagaagatgcaggacaagctggtatgggtgaagatacagttccccgcccatttcacaacggaagtccttgaagaacttcatgccggcatcaacatcgtgcctgtagagaacaagacgcttcacgaacagacgaccacccttgaggaaactttcagggtgatacccttgcgcacgggcagctacgaatcccttctgtccgtacacagcgtgaaggattctgacggaaagaactaccatgaactcctctattccgcaaaggattccacggaaagctatggaacctactccatccgcaaaggaggatgcgagcgtttcgactcccgttccgccaaggagctgctcggctatctgtccgacctgctggatgacgagacccatgccttcaatgccgtatcaagcatcaagctacaggcacttaccatccagatggagcagctgatggcgcaaatgaaacagacagcggacaacatgaacgagttcagggaaacaccttattaccttatgattgacgaattgtccggcaaggggcagattaccgtcaaatactggacaaccaactgtgaggtaggaaaccggatacaggcaggcgtaaacctgtcccccaatgccaccacttacctggacccgaagacactggctctggtcagtaccacctacggcgggaaacaagccccccaaaacagagaacggattgacatctacaaatacgccttcatttcgcacggccgtgtcctgacacagaacgacatagccagcttctgcaaaaaagaactcggagaactgctggtgcggacagaaatccggaacggggtggaaatcagcccgatgccgcacgaaggactgatccgaaccaaagaagtccatctgattcttggaacgaaactggatgagccttcgcaggaaaaacagataaaagacaatctgcgtaccaaactctcggcctgttcgccggacacattcaactaccggatattcatagaatacaataaagcataaataccatacttatgaacccagttacccaacatctcatttcatcgtacctgctgatgccgctgctgaccgtgattttcggaatcgcggcctattttatcgcacgcaagaacaaactgctcaacaacaaaaaactgattgcgtatctgctgctgtgcggcataatccttgccctgcccggcctgtccggattcatggactataacttcatgccttatgcctacatcctgctggtcatcctgtactggactgccggatattacaaccggctcatccttcgcaaagtgttcgcgtcaagcaaggaaatgccttctttcggcatccaatgcctgctgacggttacggtcatgcttctgggagccggactcttttccgtagtgttcaacctctgcaacgaactccagtacggcatctgggcctccacctgcctgctgccctttgcatttccactcctgtattcccaaacggtgaacagctatttcgacatacccattgaaatttataaagtatggaaatattcggaggaatatgactcggataccttgtacatcaaccgtgaacggagcatcgtaatggatgtggacatattccgcagggtggatgaccccgcatcggaacgcataaccggcaaggcatccgaggatgtcatcttcgggcagtggttccagcgcatgattgacgactgcaacctcaaatcaccgtcttcgcccatcgtatataagaatgaaggaggagcctattacgaatgggtattctataccaaaccgtcctttttcaagagacggcgctatatagaccccgacgttacacttgccggcaacaagctgaaaagacacgatgtaatcatagccaagcgtgtggcaaacgaacttataaagtataacgaatattaaatagaaacattatgataggaaaacagagccaaaagaaaaaatatccgctggtaaactgggcggacggaatgcccgtcaacaaagggcatttcacccaacaggaagaccactttacggaccggttgtgcgaataccagtcgtttcatctgaaccgcaatacctacggactcctgccattcaagaaaggagaaccggtttccggcgatttcagcattacggaactcgttacaggcaccttggaagtccgattgaaacgttgccacgcccttacttccggaggttacctgatagattatgatgccggtgaggatgacgaactcaccgccagtttccatatccctacagaagaggaagaagaaaaggacaagcggtgggatgtcatactgatggcagaccctttcgagcatcttccttcgggtattccgaacgagaaggaaatcagtccacgccagcccaatgccttacccaaatatgcgttgagcgtgctgccgagcggacagaccgacggaagcgagctgggaagacactttctgctgatcggccgcctgcgcaagaacggaaaccgctgtgaagtggacggaaacttcatcccgccatgcacaagcatgtccagccatccggacctgaaaggctactataccaaattcgggcaactcgtggattccatagaaaaagcttcgtttgacatccttgccaaagtggagaatgcagaaaaacagaccagcctggccaccaacatcggtatgctgtgccgccatgtcatgctgttcatatccgatatctacttctccttccgcaacgaggggcaatactattcaccgctacacttcctgaatgtattctccacattggctcaccgcctgtatgtatgcctgagtttcatggacaaggaagacaaggaggacctgctgaaatacttcaacgaatggaacggcatcactcccggtgcctacgaaggcctgctgagggaaaattgcgggctgctgtacaaccaccacaatatccgccaactgatggttacggcggaacgtttcctatacctgttcaatgacctgtggacaaccctcagccgtctggaatatatcggcaagcacaaggaaaacatcgttgtcgccgaacgctccagacaaccgaaagaatcgagcgagtcacgctggaacatactggactaatcccctataagcgaacggacatgacggaagaacaagataaaatagtacggtttgacgaacattcccattcattcaacctgccggataccgacttcaaggcggaagtggtggccagcggactgaaagaggccgggtatgatgcagagcgtaccctcatattcagacggggagacatccggcgcggattctcgaaagacatccatgacatccacccggaatattcccattatgacctgacggattacctgtatctttatgtgaacaggagaagcctttatgacgagctgcccgaaggcatattccacaagaacctttaccagtccgagaaaatatcgaaggaacaggtgctggacgaaatccgcatccaccgcgaagaggaatttttcgcccgccgtttcttcaagcctttcgaaatctccctggaccatatgctggtagccttccagaataaggaacgccgcattgacgagatgaacgtacatccggatttcgtaagcatcttttccggtcaatggcccgtactggaactgctgccgacccatctggcggtcatgcttatccatatgctggcctatatggaacagattacagcgagcctctccaaagccggcgagtgcatgaccattctgaccggtgtgcccgtgcatatcaagagaggagacaaatgcgtggtggaagtggattcctgccttattcccaaattgggaagctgcattctgggagacgacatggttctgggaaacagttttgccgacggcacctaccagatgctggtagaaatcggtccactgtccgcccgacggatggagagcttctttcccggcgctgccgacagtaaaatactgaatgcgctgacagaactgttccttccctcggacaaggagatacagatccgctacatcatccagcaggaagatgcccggttcaggctgggaaccccaaccgaacaaggcgcctatctgggtatcagcacctatttatgaatataaaacatcatcctatatgaaaccgaaaaacaacacagaagtaaggaaagcctatctgagattcgcgggctatctgacatgctgcaccatccttgcggtaagcatctttgcctgtttcctgaaaacctccggcatagaagtaaagcgaatcacggagcaggcactggaatatgaccatatctatgccaaagagctgtccctgtcgaacagcatggactccatctaccagtacatgaaactgatgaacacttcaccgcaaataaacgacaagctcctgcaaagcgttgtcagtacgcgcaagatgaacctgctcaaatatgtccaaggcatggacaccaaagattgcaggctttacaggcagctgctggaaaacctcaacatcttcctcggggtaaaagactccatccgtctgctgaatatccaggaagagatggtgaagaaagacctgatgcagtgcatccaagacaactggaaaacaaggcgtaacctgaatgtgggttccggcggcaacaaacaataaaacggaaagccatggacaacaacagaaagacaatgaacaaacgggaaatattcatgggacatgcctatgtattcctgttctttttcctgacaaccgtagcgtgttgtctggtaatcttcatgtggaactcagatttcaagatgtttgaacagaaagagttcgtaaagatcaagatgaaccgcatcaaggatttccagcaggaacaagcggaaagccagttgccggtggactccctgttccgtaaaatagaaacatttgaaccgggcgtttacgcccagtatgaagaagacgacatccattatctgataaacaacctgcggaacacatacgaaaggaacagctgggacaagcgatacaagctgttcatgcacattgccgacttttatgccatgtggctgtccgacaggaaacagctatggagtatcggacaaaacataagtctgttcaaagccaatctggaggagtgcgagataggcttgcagaaaaaggaggaagacttgcgctcaggaactaaaaacaaatgacatgggaaaaatttataccagaaagattctgttcgtaatcgcagccatgctgctgtgcatccttgtcgccatactgatccggctgttcttttccagccgcaccgtgcgtatgacactgacccccatagaggtggaaaccggagaaacggtccattatgcagacagcacccgcaacgcacgctcctggctttgggaattcggcaacggggacatatcacacgaacggagcggagaatacgtgttcaagaaaccgggacgctaccaagtgcgccttcaagtggacggaggactggaaaggaaacagatcatcacagtacacaggagccgggatgattacggaagcgacgagcttgtcaggatgaaagcaccggcaaccgcctttcaaggagaaatcgtatctttcaaaggatacggtccgtcgaaagaatggcgctggcagttcggagaatccggaattgtcgattcgcgggagcagaatccactctacgcctatacagaacccggcatatacgaggttctgctgactacggagaatacccaatatccggtccggcacaccattgaaatccttccccaatatacggagaacgactcgacagacgtgcttgtcatcatcggcaatgacatccgtgaacacttgcaagccatcgtggacggcaagccgttcaatacccattacaattatatcctgaagaaatacctttgcggaaatccggacatagcggtaaccgtcaacaacagcaagaagaatgatttctattcctattgccaaggactgaaaatcatagcacgcaggaaaacccttatagacgaggtgttcgtcgatatgggagacaacctgagcaacgaatgtgtgatgcagctgatggtaacacagcacgaacgcttttccgaacaaaaaaacaaatgaggcatgaaaaagaattgcatatcgacactcataaaaggaggatggatttgcgggtgcatcatctgtatggcatcctgcggaccggtacaccgttttatgcggataaagaatgtaccccgtgaatatatgcgaaactattccatagaaggggtaaaggctccccgcagccagacactgcccaagcataccccgtggattgtctttgccaatgaagcaggaacatcctatctgagtccgagcggaaagaacgagatgcagtctgtgaaatacatggacgcatttctcgtcatcaagcgaaaaggagactggctcagagtcattcaatacgacccagccattctgaaaaacgggaaactgaaagaatggaaacaggcaaaatactgcggatggatcaaccaaaacgacctgttgctgacccggagcggctttaccgacattgttaccggattcaaaaacaaacaggtggtcatgctgaacgacagcgtggcattggccaccccaaaaacgtattttgccaacgactccgtaaaactgttcaaaaatacagacctgacacaagaggctggcaagattccattttacagtgtcgtatatccttatcaaatatcggaagacaaaggatgcaccctcgtggcagacaagccgcagcttgacgcagacagcatagggcatgctgtcatcggatggatagacgaacgcctgctgaccgcccccgaacagcagctccatatagacataacctcgctgccggacagcacgcttgtttttaaagacagggaacggaaagacaccttgccgctatcatccaacgacctgaagcggaaactgcaactttcggccagccagcctgctatccgctacagcccggtactgtcctaccggaacaatgacacgagcttctgcttcaaaacccggcttccgatgccggtcatcgacaaacgggaaagctatgtgctgaatgtcaacggcaatccaatctattacgggactttcaaaaacaagatagagaaggacctgcaaaaaataaacctcatgtttgtcctggaaggaaaagagaacaccatccaacggtttccagccgtggtgaatgccatccaaggactgcaatcgcaactggtgaatgacgacagcttttctttcaggttcggtgccgtgcttaccttcaacgaaccggacagccggaaagaccccatctgcaaactgactcccgactacatggagctgcttgatttcctttccgccaaagcacgtaatgccgagcaactgaaacctacatacggacgattcggcagctggtccggccttcggatcggagtggagcaattcaacaaatgtccagatgaaaccaatatcctggttgtcatcggcgataaagggttcaacagcgagtgggcagactccaccttggtgaacaagctggtaaaaaacaactgccgcatgatcggcttccagctctacggaggagaaccggataacttcaacaacttcgtgctgcaaatcgggaacatgatagattgctcggcaccacgcatcagccggaaaaaacgggaactgattgtatatcccgaacaaatcagaaatgaaaacgaatatgcggaggtgaaccataacacctattgtctggactttccaaatcggagcatgacacagggatggctggtgtttccgcaaaagaacgaatcgctggaactggaaggactgaccaccgccgtggattccatgctgatacaagtgaagtttgacaataccctgctgagcaacagtctggcaagggcattcgacgaagtgggtacacaccgatataggacagattcgacaatgacagcttattaccatatccgccagtcgggggtacaccccatgctatccgtacttccggataccgaacctgcctggagcctgcctgcacagccaatcgtactgccggactcgctgtcctccacactggactattatctgcttgtcaacgaagaggagttcaaacggttgagaaagtatgtggaagcaccctccaagctgatcgttgactataaatacgaagcggtcaaaaagaaaaagcaagcgaaggtggatatctgcgactgtccggacgactacctacaggcagatgccgaagaatctaccgtacgtgtaaagacggacagcctgaacgcaccggaatatgcctcaacccgccgtgcaaggagaaaactggtcagacatttcctttcagagcgcaacagggacagatattgcaaggtagggagaaagactttcctgagaatgcccctatcagaggtcttgcaaaggtttacctcctgcccgaccgactatcctttctttgaagtttaccgtgtcaaggacttgcggaaaaagaaaatgattacggatgcggagctggacatgctgattgaatatttcaaggaaaagaaaaaactgctggacgaagccgccggcaagccgttccagtccaacgggcagacatactattggatcagccgtgacctattaccatagtcattcacctgaaactgtattatcatgatttatgaaactattctgaaaataagaggaatggaggtgccgatactctattataactatcggtgccacatccggcactatgatgacccgaatctgagaaaaatcatacaactccacatccaagtatgcgaggaaatcggcaatcgggagtgtctgccggtcgagggagacctgattacgcttgcgtttgagtgcaagggtgaagaacagttcttctatgactggctgaacgaaggagccatgcacaacggggaaatccatttcatctacaacgaagtggagattgcggacattttccggttctgggactgcttctgtgtgaaaatagaagagtatatgagtgtaggaaactctccgatgatgatggtgctgtatttgtcaccggggattatcaaaaggaataatctggaggttagggagaaggtgtggaaggtgtcggatgtttcaattatatatcaaacttctaccgagaggaaagatgattcggttagcaatgattcaaataagaaaagtctttctgtaatttttgtaaaacctccatttcaattaaagaagaaatttcaaaaagatccattttatgaaattgaaatgaggaagcaattgcaaatgcagcaggatggaataaataatatgactatatttgagtggctgaaaaatagggagaattttaaaaaatatgggcgtaatcctaaatctaagaaaattcaagaagattttagggatagatataggaatgctaaaattgatgagtatcttttattgtatgaagatatggatattaaggctatagaggcaatggttgactcagaattggaaggcttagcagcattacataatcctgatcagatagcaggaggatatgttgatgtggtgactcaaatgggaaataaaagaataaattcgtccattgggtcacaatggggaagtatagaaaaaggtcgttctcttaatattgaaaatgaattgttaaaattaataacagaccctcctcctataacagaagaggagcagaaaaaaataaagatgaatgtaaatttagttgaaaacttagaaattgttaagtagtatgtttgagaaatttttagaaagaagtggaaattctataaaattggaagagtttagtgaggattatatccgacaatacaataatttggtttcggaaaaactaatttctttttggagaatagctggtattggcatttattgtaatggcttgtttagaactattataccgaatgactatcagtatattatagaggaatgttatcctatgtatgattatgaaacagtgactccatttatgataactgtttttggagatatttttgcttatgttaagaatcatgtaattggagattacgtcgtttttattaatataaggtatggaacttttaaaattctatcagaaaatattgacatattgttaaatatagtaattttcaataagagttgtcttgaaaattggtttttattgaatgaatataatacaataaaggaagtgaaggcgatgcctaagatagatgaatgttatggctatgttcctgctttagttgcaggtggaaaggattgtattgataatattcaaatagtaaagattgctccttatattgatacggttattcaattaatgggcgatttaaaaagaattagataatatcaaatcaacacatatgttacagaatgtttttaaggttgatacaatagtttatgtttcaattaatttaaattatgattatagtatatcttatatggaaaatatagcccggaacttcacgaagaagtatccaagctatcttatccataagaaaagcgaagacaagataaaagcctttctgaccgacagggtgaagaccaaagtggaaacctttgtgaatgcagaggcaaagaacgtggcagtaaccgaggtgcgagaaatagcagacctgatagcggaatatgaaggtgcagaaagttcttcatcttttggaccccatcctacggattccccctctttaggaaacaccggagtggagcttgccatgagtgtagacacaggcgcatcggacatccgtcctgtcaatgtagccaaacccacgggggcaacaggaaaacccaagataatgaaaagaagtgtcatccgtgtaaccatggaactggaagtgcagatggaaaccaaacaatacttgcaattcctgcaacagattccagacctgttcagcctgcatgaattccccaatttgagatgccgcgtgatatgcaaccagaaaaaggcaacaatcaacgaagagccagcaccggttgaagtgaaggttttggatgacagaaaataccagcggtggtttgttgcctttacactgttgatggtatgctgcatgggcggaatcatagccctgttcttttccattccgaacctgtacaaacaggacatccacttcctgcggaacgatacgattcatcaggagttttccatttccaacagccgtattgacttgaaggatgtaagcctgacgaatcatggcgggaaagacacacttgtcatcaaggataaaaagataatcatagccaaataaaaagcaatggaaaattcgattcagatacaagggataagaaacatgctatcccatagcggatgcccggaagacctgctggaaagttacctgcaattcctacaaaccgaaggccaacaggtgcagattgtcagaggagaagtctttatgatgtttgaaaaggaagcgcaataccgcaagagaaggaatgaaaagatgaaaggaaccgtaactttctgcaaaaacacgaagaacgatacaggggaatacaatacaggagtgttcatcggaatggaatttatccaatgctgcttcaaccatgggattcctgcacgggtgctgaatgtgcggagagtacatggggaagtgacggagattgtcgtggagttcgggaagtagatgaaaggaatacccctattgcagagctccgacctaataatatgtgggggaaattgatgggaaaatccccccacacacttcatcttgatatttaatgagaggaaggattactccttcttggatgttttttcattatccagccccaatcgcttgcataactccggatcgtttttgatacggcccatctcttcgttgatgatggcctgcgcgtccgacttgatctggtcgtagttacgctgaatctgctgcatcatgatgtcattaccgtccttgtccttgaattcgttgatgaaagggattttcctgtaggccttttcttccgcactgaccgccgcatggtctacaacaatttcggcatggaatattttctgttctatcttctcgccaaaattatccgccacagccccgacaaacgtaccttgcgacagattggcaatcttggatgccgggataagcgagtcaagctgcgtgttgatggaagtggaaacatcctgacggttgatggaaacggactgacgctgctggagcaccttgccgaagcgttcagaaagtgtctttgcggtttctccgaccacctgcccgctgaatatatttcctaccgtgttctgaataaccttggactccttttcaccataatcgcgggtcagctggctgaaatcctgaaaacccaaaagtacgcccaccttgttgcttcgtgccgttgcaatcagattgtcaagcccccggaaataaatggtgggaagctcatcgatgattacggcacatttgagctgtcttttcttgttgataagtttgacaatacgggaattatatagtccgagtgcagccgaatagatgttctgcctgtccggattgttgccgacacaaagtaatttgggttctttcggattgttgatatccaacgaaaaatcatttcctgtcatcacccagtatagttgtggggaaatcatacgcgtaagggggatttttgccgaagcaatctggccctggagctgatcctgcgcccctcctttccatgcatccatgaaaggagaaaggtagttttccaactccggataggaagtcaggacggtgaacaggtccgaataaggcttgttcagtaattccaccgcatgcgggaacgtacaataaatcccgttcttgtaaatcttcaaataccagattattgcagcaagcagaatgatgggggattctacaaaaaagtcaccctgcttttcaatatcgggtaagtcaagggcattactgcccccttctcccctaagaaccgtacgtgagagtttcccctcatacggctcaagcaactcaatatttctatttgttgttagaaatcggctcatactttcaacagtttcgtttatttcgcttgtagcagttgttatggacaagttgccgtacaattgaaccaccaacagatatttcattgacgttccatgcttttgtacaatctatctccttgccgcataacggacaagtccgcttctgcttgttccataaatataagagtgacttacgtcctttgagagattccagcatttgttgctcctttcgctgaaagaaataatcatcatattccgggtcgaaagggtttgcctcccccttgacttgcttgtacggagtataatgtatatccgacaaccttttaagggtcaggtagttcactttcttgctttttgtttcatatttccatgcaaacgtccatttacgcccccgaatttcatgccaatacttatctgcaacccaagacttgcgtttctttgggtggcgacgtaaagcccatttctttgtgaggttgtaaatgtgattgtcgcaaccgtgaaaagcattggttgatgcaccatatcggtaatagtttccccaacctgttatcacaggattgagcattcgtatcagcgattcctgcttacacattttatgacctttaacgatgtcactgatttttgccctaaagcgtttctgtgcatctttggacggggatgtgtacagccttttgccgaacttccttacattgaaacctaagaaatcaaatccatcgtatatgttcgtaatggtagttttctcttcggataaggtaagacccctttctttgagaaattctatcaccattggtttgacctcgttttccaataattccttatctcgacctgtgattataaagtcatccgcatatctgataagattcactttgtagtggaatgtcttatagttgatgaaacgtcttttgaatctttcagccaagagtggttgaagtccgtcaagtgccatatttgcaagtgtcggtgatatgatacctccttgtggtgtaccctcttctgtcgggaacagtttaccattgaatacagctccacatttcagccattttctgagtattgttttatccatagggatattttcaataagccagtcgtgactgatgtggtcgaagcaacccttaatatctccctccaaaatccattcgggggaatgctggcgatttagaaccgtatcaatctgacgaattgcgtccattgtcctgcgcttctttcggaagccgtaagaaaaacggtcgcctgtcgtttcggctatcggttccaatgccatgagatataatgcttgcatcgccctgtctttcatggtcggtattcccaacggtcggagtttaccgttctttttcttgatgtgaaccctacggagcggctgtggatggtagccacgacgtctaagttcaccgattgctttgtacttgcgcttgggagagtcccaaagctgtttatctactccagacgtattcttccctttgttggaagtaaccctctttactgccaatgccttggcgtaaaaagagtgagtaagcatccactgcaaggttttcaccttgttatgtctgccttctttctgagcctttacaatacgcgcttgtagctttcggacataggtttcacacttggaccagttcataccgtcccaagtcagattcctgctgtcagcaggcgcacacgatgttttaatctcgttcatttgctttcctccttttgaaagttctaaaagttatcttgtaaagagttaccatatacggaagtctgcccactttcgtgtcggatgatgttaccctcattaactcgtgatgttggttcaatccgtatcctccccattacagggcggcattcgctttctccgttatctcatacctgcaccccattcggcttgccttgcggttcgcttactcgcattattacgagagagatacaggcttgccctgttccacgcaattgacaaacggatagtttaggttctgccaagtccgccggcagtgctgtgtccgtgtaaccccaacatgggcgagggttatccgactgcttaccttttggtgagagctaaagtatcttgcgctccttcaaaccttacgacggctaaagtcagttcacttacgttaaccatgctatccagcctcgccactcgacggtatgatactaaccgcccttaacgttccctcacggttcagtcttgtcctttcggaaagtgtactttgtcctataagcttggcacaacccatcactggagatgcaccttatagtaggctaccgctgacggaacagcgggttaaatcttgcaatatacattgctgtttaacaatcaattacgtgacttttcaggtcacacccaggtgcgattgaggttgagcattatcgtatagctcgcctcgtacgcatcggaaatgtccgtcataaattccggattgataggattgcatcggtgagacctgcgcggatcgtcgaaatttatgacatagaaccggggcttgacctcgtacttgtccatattcttcaacaaagaattataggctatggtggacaggtcatcaaacttgtaatcgtagatgtaaatcgcaaagcccttggctataagctggcgtatgtaactgttgactatcgcataggacttgccgctacctggtgtcccgataaccatgcaggcacggaaaatattgacaatattgacaaatccgttattccagcgttttttataatagaatctcgttgggagatttaccgaatactcattctccatcagtcgggtttcctgcatgaaactctcattttccatattgaacacatcttccatgaggttgtgcctgtaaaggcggctcatccatagccccgacatcagcagggcgagatagcctgccgtaagagtaaaaatatagaatgcggtatttgccgcgtgcggcaatggcagctcaagcaaccaccagtttagaaagaacagtgcgcatcctgccaccagcgccgcataaattttaggccaggttatcttttcacctttgactccgtgcgtacccagacaggaaacggccagcagaagcactgccaacagtttgctccagagaatgcagttgaaaatcccggtcgtattattgaaattcaccagaatcctgtccatcaccgcaaggttcaagtgccacgtggtgatactcggataacaatacacatagacgtgtaccaccaaaagaaaaatactcacggccctgccaaattccatgatcttggcaagcgccctcaaatcgtcttcctgctgcataagaattgtatataaatgggttgatacttgttttgtctaaatgccacgtttgcgtccggtcttcttctttttcttcatgcggcgtgcaaaggcttcctcctcatagtcacgcgggttggtttccatcgaaagtatgcccgccgccagttcgagcgtgctgccggattcgtggcggtgatgctgccgaagttctgtagcggaatgtccgccccgttccttttcgggtatgttttccaaccatttgaaatagtcgttgaacacattggcggaaaactccttgcccatgcgtgaaccgttgaacacttcccgtcggtcgtggtcaatgaaggtgacaccgtagatacgtccccgctcattctcacggaacaccacatcgatatttttttgccccagcagttccacaaaccgtttccgtgaatccgcctgccgcaaggcacgggcgatgtccgcctgtatggagggtgcccattttccctctttgagagctttcagattcatcaacatccgcttttccaacagttcattcccgaagcgttttccgaaacgtgaactcttgaacggcggactgaccaccttgccggtatcatccgtggcagaatagacaatgccggtgtagggtatgccggtgtactcccccctgacctgtttcgcctcgatgttgagtgtggaaagcagtgcgctgtattccccgaaagtctggaaacggtagctttccagtacggctttaagggtgttgcctacctgatggcggacatcccccaaggaagcatccaccttttttagttccgctttcggattccgcctttccgtgtccgctccgttgcgcaagccgaaatccgtttccagttcccgacaggcggtcatggaacggcggtgctcgtaggcgtcactgatcttttttccctgtccgtctacacagacactgacgatatgaatgtgggcattatgggtatcggcatgtttgtaggctatgtacggctgattcccatagcccattttctgcatataccgttccgccaactctaccaattgcccatcagtcagctggtcttccggtgccggagaaagggagatatgcaggacgggcttctccgtattgcggtttgccagcaggtagttctcaaaagagagcaatgccagacgtatgtcctcactgggcaatcccaatctgtcggaaatcatgcggttgcccgaaagaatctcggcggtacctgccgttaccttgtcgtagttataggcaagtgctccgtaaaggcttgttccgtgacttatttttgcaaccatttccgctcgtattcctgggttagcaccatgacttttttacatacaagcatcagttcgatgctcagtttctccaacctgtagagcaatgccatcgcacgtttttccccgaaattgttcttcaaggtccggacaacctgattgtagttgtttccgacggcctgaaactgcctgtggaattcggtcagtttgatgtagtagtccattgtcgccttgtcgattttcacaactttaatctgtcccgaaaagatggatttcttgatgaacagcgtgcggtccccggctcccgaatccgccagcaatttttcaaatcttgtgttctcctcggcgttcaggcggaagctgtacttgcggtccgccggatcactcttgggctttctgcccgtccttgtccctgttgttttctccatgcacatgagatttttggtttgtacttttttctcttccggaatccgctccaaagtcgcggattcccccggcttttagccgggctagttgtttttgtcggacaaaagactttttgtcggacgaaaacacaacttgctctgttcgcttgaacagagaaccctccttcgtcggattgctgcgcgacgttcacggaacgctgtgatccgacgaagtcagttcttttccatcgtctgattccgattttgcaaaattagacagtgataaccgattggtaaacagcgtttgatatgacatttgatgacatctgatgacatctgatgtcaggtaggggaaatgttggtggaagtttcaaaaatagccgctacttttggcacagtgcatgagggcatacattgaaacattgtcctgtaaggggtattgcttgcctgccacaggtggtgcatggtgtgaatgcggcatcatccatatatgtgcaatgccatatatgctgcacgacaatcctgcatgacggaatacattgcatccgtgcaatgcagtatgggatacattgaaccccatattgcatgaatgcaatgcaccttatatggcaatgcccatcggcaaccggtattacactggtgcaatatggtatgcaatgtattcatgcaaaccggcaaacaatgcgtcattgccgtataccaacggatgcattgccgtgtgatgaaacgaaaaaatccggacagatatgaaacaaattatacactctaaattcaagcctatgaagaaagaacctttatttgtcgctttgagcaaccagaaaggcggtgtgggaaaatccacgttcacggtattgctcgccagttacttccattacctgaaggggtataacgtactggtggtggattgtgattatccacagcacagcatcagtaccatgcggaactgggaagtgggaaacattgagaagaacgtgcatctgcaaaaccagctggtggaacagttcggagcaagcggtaggaaagcctacagcatcctgaactccactccggaagaagcccgggaaacggccggacgctttcttgaaaaatcggagctggattatgatcttgtcctttttgaccttccgggtaccgtaaatgtgcccggtgtattccagtccgtaatcaatatggattatgtattcacccccatcacgcaggaaagaatggcaatgcggagcagcatgtcttttgtccttgccatccgggaatacatgcaccggcataaggatgtacccttgcgtggtatccatatgttttggaaccggatggacaaacgtgtttccaaagacctgtataacggctatactgaaattttccgttcgctgaaattgccggtactggaaaccgtcattcccagtgcagaacgttacaaaaaagactccggaatgaaagggcctctgttccgcagcactttgttccctccatcttcctccgcaatgaaaggaagcagtctggacctgctggcagcggaaatagaaaccatactgaaacttcaataaaaacaattatgactaccaaaagaagaacggattaccaagtggatgaggaggcattgaaacgcatgatggcaggagatgtgaccgctttggaaagaacggttcctccggaagaggagccggaaacaaaaagtcaggctggaccttgttcggagaaacaggagaagaaaagcggttcttccagacagcaaataaaaaaagcaccggatggagcggctgattcagatgaataccggagccggtttctgaaagtgaaactgtcgggagcaagaaggcagacctatattaacgatacattgtacagaactgttgccaaagtattgccggtcattgcaccggaaatgtctgtccccatgtttttaggaagtgtactgtcagaccatctggaaaggtatcagcatatcatcaatgaaatatataatcaagaagcaactcaaaagccaatagaatggaagaaatagtttatttatcaatacggttcggctgtaccgcttatctgttatataaggtatggaaacaaaaagagagaataggtaaaatctgtgatctgctttgtactcctcgcaatcggtcacaagcagaaaaagacaacggtgaaccgggaaatgcacaggatgtgatgggagctacccgctttgtctatctggacgagaatgccgggaagaccgtcgccccttacatgagccagcaactggaaaccggaagtgattttatcggagcggataaggatattccggaagatgaagtggaatgcaaactgcctttggaggagatgagaatgctgaaagatgaacaggaggaactggacagccgctctcccgaaacggaagccattgctccgatggttactcctgctgacctgctcaatgtaggcgacgtgctgcttaacctgaatggcgccggctcggacgagaacaaatcatacagggcggccatgacactgcattccatccgggaaacggacatgtttgaactgttctcctcccaggtggagaacaagaagctgattgaggaactgatggggaagtatgtggataaggaagggaatgcgttgcctttgaaaagagagaggaaagaaagcaaacatgttactgactggaggaatctagtctgaaaaggcaatatttatcatgttcggaaaatcctgtatgcgttaaagtatatgggattttttatatgatgtacccatttaacgaaaacatgcaacaggcattcttccaaagtggaggaaacctgttttttctttttcatccgttgtacggcaaagacatctgatgacatttgatgacatctgatgacacctctgaatcatagcgtattatccccatttatctttgttgtcgaattcaaatttatgtcttacccaaacgattcgacaatgaaaagaagaatccttttttctgtgatgtgtgcggtcatcgccgcaaacacctttgcgcagggccagggccttgcgggtatcaacgaggcaaccagcctcatgacctcgtatttcgatcccgccaccaaactatgctatgccatcggtgcggtgcttggtctggtaggcggtatcaagacctatggcaaattttccagcggagatcctgacacttcgaaaaccgccgccagctggttctttgcctgtatctttctgatcgtagccgccaccatcttacgttccttcttcctctaaagcctatggaatatccggtaaacaaaggtgccggcaaccccgtcgagttcaaaggactcaagtcgcaatacctgttcgtctttgccggagggcttgcgatggtgctccttatggtagtctttctttacctgacgggggtggaccaatggatatgcttatccttcggaatcctgtccggcagcctgttggtgtgggtgatattccgtttgaatgcccgttacggtgaacacgggctgatgaagctgctggctgaaaaacgacatccacgctatctgattcaccgcaagagagttttcagattattcacaagaagaaaaaaacaacaatcatgagaaatgtattaaaggcggaaacgctggaacgcagattccccctgctatcggtagaaaacggctgtatcgtgagcaaggatgcagacctgaccgtggctttcgaagtggaactgcccgaactgtacacggtaacggcagacgagtatgaggccatgcactcctcctggatcaaagccatgaaggtattgccggaacatagtgtcgtctgcaaacaggactggttcgtcaaggaaacctaccgtccgaagaccgatgacggagaacagagcttcttgacacgcagctatgagctgcatttcaatgaaagaccttacctgaatcacaaatgctacctgttcctgacgaagacaacccgcgaacgcagccgtcggaagagtgacttcaataccctttgccggggattcctgttgcccaaagagataaccgacaaggatgctgccgcccgctttcttgaggcggtggaacagttcgagcgtattatgaatgattccggacatataaggcttcgccgtctggaaacagacgaaatcaccggtacgaaggaacgtcccggactggtggaaaaatacttttccctctcgctgaaggatgagaccgccgtattgcaggacatctgcctcaagcccggcaggatgcgcatcggtgacaaacgcctctgcctgcataccctttccgatacggaagacctgcccggcagactttccacggacatgcgctacgagaggatgtccacggaccgcagcgactgccgcctctcctttgccgcacccgtaggactgctgctgtcatgcaaccacatatattcgcaatacgtgttcatcgacgacgcacaggaaatcctgcagatgatggagaaaaactcgcgcaatatgctctcgttgtcaaaatacagccggagcaatgccattaaccaggagtggacggagatgtatcttgatgaggcacataccaaaggagtgcttcccgtcagatgccactgcaacgtcatcgcctgggcggaggatgcggaagagttccgccgcatcaggaacgacacgggcagccagctggccatgatggaatgcacgccaaggtataacaccattgacacaccggtcatctattgggcgggaatccccggaaatgcaggcgactttccatctgaagaatccttttataccttcctggaacaggccgtatgcctctttgccggagagaccaattacaggagctcgcccagtccgttcggcatccggctggcagaccgccagaacgggataccggtgcatgtggatatttccgacctgcccatgaagcgaggaatcatcaccaacagaaataagttcattcttgggccttcgggcagcggaaaatcctttttcaccaaccaccttgtccgccaatactacgaacagggagcgcatatcctgctggtggacactggaaacagctaccaggggctgtgcaggatgatccatgaccgtaccaacgggaaggacgggatttacatcacgtatgaagaggacaatccgatatccttcaacccgttctacaccgaatccggaaaattcgatgtggagaagcgtgacagtatcaacacgctgatactgaccttgtggaaacgggaggacgagtcgccgaaacgttcggaggaggtcgctctttccggagcagtgaacgcctatatccgaaagatttcggagaaccggaacatcagaccggacttcaacggtttctatgagtttgtcgccgatgactacagaagaatgattgaagagaaaaaggtgcgtgagaaggattttgacattgacggttttttgaacgttctggaaccgttctaccggggcggagattatgacttcctgctgaactccgacaaggaactggacctgacaggcaaacggttcatcgtattcgaactggacaatatcagcagcaacaaagtgcttcttccagtggtgacactgatcattatggaaactttcatcgccaagatgcgcaggctcaaaggtatccgtaagatgatattgatagaggaatgctggaaagccctgatgtccgccaatatgagtgaatacatcaagtacctttttaagaccgtcagaaaatatttcggcgaggctgtggtggtgacacaggaggtggacgacatcatcagctccccgattgtgaaagaggccatcatcaacaactctgactgcaagatcctgcttgaccagcggaaatacatgaacaagttcgagcacatccagcggctgctcggtctgaccgagaaagagaaagggcagattctttccatcaaccaggcgaaccatcccgggcgcttctaccgggaagtatggatagggcttggaggaacctgctcggcagtatatgccacggaagtgagcgaggaagaatacttcacgttcacgaccgaggagtcggagaaactggaagtacaacggattgccggaggaccggagggcagtctggaaggagccatccgccgtctggcggagaaaaagcgagaggaacagaaacaggtatcaaacccgaaatgaaaacgattatgagaaacagaccccttatgaggctggcggtatgtctgataagcatggccgccatgatattacagagctgttcggaaagcggtatcgaccgcgacaagatctgcggaacgtggaccagcgtggaaggcagacctgacgtgctggtatacaaggaaggagaatgctataaggtgacggtgttttcccgtagcgggagaacccgaaggctgaagccgcagacttacctgctggtggaagaaaacggaaacctgtttgtcaatacgggctaccgtgtcgatgtgtcctacaatgaggcagtcgacgtgctgacattctcaccgggcggagactatgtaaggaaggaggaacgggcatgaaggcaagaacgcttctgatcggaacggcatttgtactgggcgttaccggagcacgcgcccaatgggtggtgacagatcccggcaatctggcccaaagcatcataaacatgtcggacaatatcgcccatacctcaaagacggcagtcaatacggcagaaagctttgccgagacagtaaagatctatgagcaggccaagaaatattacgaccagctgaaatcggtcaacaacctgatacaggatgcccgcaaggtgcgtgacatcatcctgatggtgggcgacgtgtccgacatctatgtaaccaacttcggcaagatgatgaacgatgaaaacttctcaccgcgcgaactggacgccatcgccttcggttacacccgcctgctggaagagagcaacggcgtgttgcaggatctgaaacaggttatcaatgtcagtaccctgtccatgaccgacaaggaccgtatggacgtggtggacaactgctattacgagatgcgccgttaccgcaaccttgtgagctattatacgaacaagaacatagccgtaagctacctcagggccagaaagaagaacgacctggaacgtgtgatgcggctctatgggaatgaaacctccaaatactggtagccatgatgccgttgtcgatagattttgccaacctgcacaccatactggcaaccctgtatgacgagatgcttcccctttgcgaggacatgatggacgtgggcaagggacttgccggactgggtgcgttgttctacgttgccgtccgtgtatggcagtcgatggcacgtgccgaaccgatagatgtttatcccctgctgcgtccctttgccataggcatctgcatcctgctctttcccacgctggtgctcggcacgctgaacaatattctcagtcccatcgtgcagggcacacacaagatgctcgaaggacagacgatggatatggaacagtaccggatccaaaaggaggaactggaaaaggaggccatgctccgcaatcccgaaacagcatatctggtaagtgacgaggagtttgaccgtcagctggatgaactgggctggtcaaccatagataccgcctcccggctgggcatgtatgtggaagtcgggatgtataatctggaaaagaaaatccgggatgcattccgcagcctgctggagctgatattcgcagcggcatcgctgctgatagacaccgtgaggacttttttcctggtcgtactctcgatactgggaccggtagcgttcgccttcagtgtatgggacggattccagtccacgctcggacagtggttcacgagatatatttccgtttacctgtggcttccggtcagcgacctgttcagcaccctgcttgccaagcttcaggtactgatgcttcagaatgacattcaggaactgcagaacaatccggactactcgatagacaactcgaacagtgtctacatcatctttatgctgatcgggattatcggatacttcaccgtgcctacggtagcaggctggatagtgcaggcaggcggtgccggaaacttcagccgtaacctgaaccgtacagccaccaagacaggggggcttgcagccggagcaggcggtgccgtattggggaatatcggaggcaggctgaggggcaaataaaccctgcggagcctccttcccatgagtcgggcaacccaagatgacgggtccggtgacttgtcggaacgggatgtcccgtcataccggaaatatttattcattcaaaccagacatcaaaaaaatggaattcaagtcattgacaaacattgagagcagcttcaagcgcatccgcctgctgctggcggtctttgcctgctgctgtgcgctcgttaccggatatgcgctgtggagctcataccgctttgccgagaagcaacgcgagaaaatctatgtgcttgacgggggcaaatcgctgatgatggccctttcgcaggacctctcacagaacaggcctgccgaggcgcgggaacatgtaaggcgctttcacgaactgtttttctcgctctcaccccagaaggatgccatcgagcacaatatcaaccgtgccctgcaactggcagacaagagtgcctatcactactatgtggattttgccgaaagagggtattacaaccgcctgatttcaggcaacatcaaccaggtggtgcatgtggacagcgtggtgtgcgactttgccgcctacccttacaaggtgcggacatacgcccggcagctgattatccgtgaaagcaacgtgaccgagcgcagcctcgtaacttcctgctcgcttcaaaacacaggacgttcggatgacaatcccaacggattcattatcgagcagtttaccgtgctggagaataaggacataagaagtgcggaacgatgaggggaaaacgcggattcttcggccatgcggacagccgggtacggctgttctgccggcggctgacaggaaagcagcgcatccttctggcaggcacggtctcgttcctgcttgctgcctcctgtctgtactcgattctctcctgtgtatcccgtttcggggagccgggccaaagaccggcaatgggacatatccgttccgtcgtgttccggtcggaaagaacaagaaacattcattcaaacatccataaacatgaaaatggactttcagaaaatcagggaacggctcggagtgtcaaatgacaagccgctgactcccgaagagaagcgccggcgcgcaaagtatattgtctatccgtttctctgcctgctgtgcatggggttcctcctgctggtattcagtccgtcggaaaaggagaaggcggaaatggaaaaaggcaagggtttcaacgtggagatgccttcaccggaagattcggaaatggagggcaacaaggtaagcgcctatgagcaggaagcactggcaaaaaaggaaaaatggcgcaggggaaccttccaggagatgtccgaactgctcaacaagggcggtcaggatactgccggtcttactgcaggaaaagcaaacatggaacttccgccggaaccggaaaaggggaaagcccccggctccatccgttcctctgcagaagcctaccggaatatgaaccgttcgctgggcactgtatatacccggaatgaaaatcagccagatgccgatctgctccgccgtattgaggatctggaaaaagaaaggaagccggcggaagaacaggcggaaggccagaccctggaagaaaagatggctctgctggaaaagtcctacgagctggctgcccgctacaacgggaaagagcctgatgcttcctctacggccaatgccccaaacagccggaaagaacggacggctgtccggcctgtaaaacgggtacagaaccggatggtgtcatcactcgcccagcctgcaggcaatgaagacattgcttccggatatgcaggcgagagaaataccggcttccacaccccggtaggcaaaatgccatcttccggcaggaacaccatcgccgcctgtgtgcatggcacgcagaccgtatctgacggacaggcactgcgtatccgcctgcttgagccgatggcagtggacgatctccttatccccaaaggtacggtactggtcggcggtacacgtgtcgagggggaacggatgggaatcctgatcgagacagtggagtacaggggcacgctgtttccggtggaactcgaagtgtatgacgctgacgggcagcagggaatccttgtaccgaactcgatggagtatgatgccgcacgtgagattgccgccggcatgggcacctctataggaagcagcatcaatatctcaacggatgccggagcgcagattgcctcggatgtgggcaagggggtgatacagggtatgtcacaatatgtgggcaagaagatgcgcacggtgaaaatcaccctgaaggccggacaccggctgttgctgcattctcctgaaaaatgaaggaggaaaggaaatcaaccatttattcaccaatcaaccaagaaacacacatgaagaagattctgatgatgcttgccctgattgcgggcacagtggctgcatacgcgcagcagagcagcggggattattatgaaggactgagccgcaagatcggattcagccggatgattcccccacacggtctggaaatcacatatgacaagaccgtacatattatttttccctctcccgtgagatatgtggacctgggttcgcccaatctgatagcgggcaaggcggacggtgcggaaaatgtgatccgtgtgaaggcaacccggaaacatttccggagtgagacaaacatgagcgtaattaccgaagacggcaacttctatacattcaacgtcaagtatgccgacgagcctttgctgctgaatgtggaaatgtgcgacttcatccatgacggagaggccgtgaaccgtccgaacaatgcgatggaaatctacttgcaggaactcgccggggagtctccccgtctggtacggctgatcatgaaatccgtgtatgaacagaacaaacgcaaggtcaagcacatcggctgcaaacggttcggagtgcaatatctgcttaaaggactttatgcgcacggcgaactgatctatttccataccgaagtgaagaacgccacgaacgtgcctttcgacgtggacttcgtgaccttcaagatcgtggacaagaaaatcatgaaacgtaccgccatgcaggaacaggtcatctatccgcttcgtgccttcaactatgtgacccgtgtggacgggaagaagaacgagcggacggtgtttgccctgcccaagttcaccattcccgacgacaagaagctgatagtggaaatgtatgagaagcaaggcggccggcatcagtcctttgatgtagagaatgaggacctggtacgcgcagaaaccgtcaatgaactgaaagtcagatgaacgccatgaaaagaaactccctctttattaccctcctgcttgccctctttacggggcaggcagaagcccaacgccgcctgccgggaatgaaagccgtccgcttcaccactgaaatggccgacggattttacagccgggcaaaccgtcacgatgcaggctatgccttctcgctggctgtatccacctgtaccgggaacagaaaccagtggatgtttggcggtgagatgctgaaacgtaacatcccttaccggagtacgcatatacccttgtcgcaatatacgggggaaggcggttattaccatacgttcttttccacccccggcaagtccttcttcctgaacctcggcgcttccgccctgttgggctatgagaccgtgaacgaaggagaccggctgctggatgacggagccgttttgcagcaatgcgagtctttcatctatggcggcgcggtaacgctggaagcggaaggatacctgtccgacagggttgtcctgctggtgcgtctgcgtgagcgtttcgtgtggggcagcgcctcgggaatctgccacttccagtatggaatcggagtaaaatacattttctaaccttaaaagaatacatacccatgaaaagaaaaatccttgattttatgctgacagcctgctgtatggcattctcctttcttggtcttgtcgcttgtgacaatgagctggatatcaaacaggaatacccgtttgcggtagaagccatgccggtagcggatgagattaccgatggggagactgtggaaatccggctggaaatcaagccggaagggaactttaccggaaccgtctatacgctaaggtatttccagccggatggtaagggcagtctgaagatggaggacggaacggtactgaagcccaatgaccgttatctgctgaacgaatggaaattccgtctttactatacttcgcaaagcggcaaggaatcccagaccatagacctctatcttgaagataattgggggaatctgcaacaattgacatatgattttaatggaaaggatacggatgaagaaaataacaaggaggctgcatgaaaagaataccggctgttatgatctttctgttacttgtcttgtacggcaaggcggaaaatcccccgtctgacaaagataaggcggtagcctgcatcaagcggtgggaaggctggcaccgggggaaaatgccttacatcggttacggacaccgcctgcttccccacgagacgctgaccgagaacctgagtgaggcacaggcggactcacttttgagatgcgaccttgaacggtgtttgaaggtattccgaaaatatgggaaagattcgctccttttaagtctgttaggctttaatgtaggctgttaccgtctgatcggcaacggcaagatacctaaaagcaaactgattcagaaactggacagcggcaaccgggatatttacaaggaatatgtatcgttccgctgttatcgggggaaagtcattccaagcatagagagaagaagaaaagaggagtttgaactgttctatataccgtagattgcttgttgataaaggtttggttgttacgagacgaccgaatcttttttatttgtccggtatgaacatatccctaacaggtgttgtattttaatgtaaccgaaagacataaaatgtgttattgagcatatggtgcataaaaaatgctctttgaacattgtctttcttgattttttgctaagtttgagatgtaatgtcaaatgcataaaacaagtcgtcatgaattcagaaataatattggaaataaatggctacaaatgcaatctactaaagtataaatactgtttttcccgtaatatagaccgtaaaggaagacctgtaacaggaatgttaggaggaaacatatatatagaaatggaatctaatggcagcaattgtattttggatatgatgcttgttgatacggatcggcagcgttccgctttcttttctcatgcagaaccttttccggtttgggggaagatactgcatagcatagacgatatgatgtttcgtgaacttttacttcgtatcgttatatcattgaaaagtttacggatacaaaaaacgcctaagctatcacctaattgtggcaatttgcgatgaaacctttctgaaagtaagtgtaaccgcaaagaatgcttttcttcgtctttatactcgaattgcttttcaaacataatctgattgttctgttctcctttgacaatgatagtggcttccttaccattgtgggcttgtacttcaattgaaattattgttctgttcatacttacaaattttctttattctatatataaaactttgggaaagatatatgagtgacattttgtcagaatagagatataggcatacctcttgtacatataaaagtgtcccctaatattcgtagtatcaggaggaaaaggattcgtttaacactgtaaaattgaacaaaatatggtataaatattggattgaatttaccccatagggaataagacaaaagcttatttggttagagaagtgattggtaataaacttgctcttaccgcacccgattatactcgtttatacttgggtatgtctgaagttgaaaagataacggactgtaatgtgttatttaaactgggaaaaatagatttttaaatattggaatatgaaagaagaaagatttattgaagaagattttgaaggttttctggaggacttgataaagtctggtcgtttagatgacaaagaagctggtatagctaaaaggatgttggacaaaggatatgacaatttatctgataaacaaaagtatgtctttaataagatgattaggaataacagcgttgaggaatgtcaaagatgtgcttgtgatattccttggtctgaaatgcttgaagctcttgataatggcggttattgtaactactgtcagcatatgatggagaaactggaaaacgagtaagaaaataacgggaatagctatcaaggttattcccgttaatgtttaatcagttattataaatcagacaagcctatttagggtattgtcgtaaatactcacctcatataaataataaataaggacatttttcccaaccatattatgattatatgaacgaaaaccataaagacacattacatattgaaagtattcagcaactaaaaaaacaagaatcctgatttagttgatgcttttctggaaggagatagtcttttatttagagtgcactataatcaaaatttaattccatatacttaccctgttcaagttaaataacgagcaaatagctgcttggataaaatgacttgaatagtcaaattagatacatttacaaagcgggcagagtcataaaatgggaaagggctaaaaacagaaacgccacaggtatgatgtgatatacatcaccttgtgacgtttctgtttttttaagatgtatttgtctgctattcttacttttgaagcaagtattcccctattgaaagataccggtctttgattgtggcattttcattgaatccattcagacaatggagcaaggctttctccaaagtggtgtatctgcggttaaaacattgcggattgtccaggcaataggcattcaaggcatatctgtatggggcatattcaggattatcctcttttgtgattttcacatgccaaggaaagtgtatccgcagagtgaatgaccgtgtttccccttttgtaatccgttcctcttcctccagcatttttttcacgagggacctgtccagcaacggatatccatattccctgtaatgtttgatatggcagcaatactccgttgcgtattgcttcaattcttccggtcttataccatagtgcttcccatagaaaagcagcacttccctgcctgttacgataacgggctttccgtccgcttcatgtttaaatacctgccgttccatcttttccctgtctgtcagcaaggcaaaaccgaaacattccgtaagggtgaaactttccctgccgggaacggacagcccaataaggctttccaatgtgtggcagtaaaagaaaataccgtcatcggccataccggtgtccggtgaaagcataattcttacatccttgacctgaccgctgtccctttggacaatccggcaatttgcgtaatgtggctcacaagcattctctttcttgaacctgtggtatttctccaaaatttcgttccggatttcctccttgtcggtcagggcaactcccaatccgcagttttcgcaccacccgtaataaaaagcttcgtccgtgaagtggtcgaactcttttgtgttggggtttaccattgcctcacacctgacattggccgatccgcatctgctgcacactatattattttccattgttcttctgctttacgggcgactcacggccgcccttgtcatacaattcggttgttattctcttaatttatctttacccggttcatcagctgtcccgaaatttcatgcagttcccggcagcgttctggctgctgttcccttgcaaaggcggtgattccctgtgtcagtttccatagcgtggccccgcctgtaactccgtcgtcaggattgttgttcatcagcagtttctcgacctcacgtccctcgtttttcaacaaggctcctttctgcaccagattcttcagttccttgtcgaaatccacgtctatctccgatgctccttgaatttcgatggccttctgcatgatggtgtctttgctgtacagtcctttggtcaggtcggaaacagccgatacggtggtctgcgtgtccagttcgtaggtcttttgggagagggacagggattccggcagtcggcctccaaggtgtatctgccgcatgacggactccctgaccatcccgttcaggcacgccccgttgagcaggaacgaccgcatatcgaccgatccgttgccatagtcggatgtggagaagcgtgctcctgcgaagatgatgaccgttccgttcttacgggtgggtatctctatcggagtgggcaggattgtttcacaccatactttcgtgtcgttcatataggcatcggacacgaccgctccctgtcctcccgcctcacggatgaaagcggtcagtatatccaccgagttcagccgacggtaggagtccgacaatacgccccggacttccattcctaccgcccgtatcagtacccgtgtacgctcggtccatcccgaatgctcgttcaggatggtggcgcacaactgtttctgccaaacatccccggcggaaagctcgcgcaggtatttggcgggaatgcccatcttctccgaaatctggcttatggcgttgccgtgcaggttgaagttcccttcgggcattgccatctgtacccttccttccgctttgaaagagataacggggcgttccttgctacgttggcttaccccgatgggagcgatgaaatcctgcgcgatccgtccctcactgagcagacggttaatggtgtccatgacaccaccttgcctgccttctatcatccgctgtaccttgttaatgactacctggttgaggccctgctgcttctgtaccgatgcagctgccggcattactgttgtttccataatactatgtttttaatgttgatgaatcagaatttattcttagagcttgtcttggttgttttagcatgtcccatgtatttttcttctgacaaacggatataatcctcttcgctatatccggtcagcccgaacagttcataatatccggggaaagtttttttccccgcttccggtatatgcatgctggttcccttgtggcagcagatgatatgccggacaaagcggtaacacttgcaaagatcagccacgacggtatattcgttgtccgtatgaggttcgtaatatccacaggaaagattgatacaggatacttccagaccgttccttttcaaagccgccacatctgtattcagtccctgtgccggcttgtagccgtacttccggacatctatagctgaaatgaactcgttggagcagagcttcatcccattgatttgtgttaccatatccccgttccctttccggtcacactgaatcacgaaacggcaatcggaaaagaaggacatatcggcatggctgctgcctatgcatcccacctcctcctgtacgaagaaggcacatttcaccgtcttgcaatcctccaggcatttcaggcagatccagatgccgttcttgtcatccgcaccgattccggtcatccgtttacgcttgtgatcatagccgacaatcatcgagtccgccacaagatgggctgcataagagcctgtcttgcgccggtgtacctcatccatgtgcgccacgacacaggggtagctttcccggttgcctttgaccgcatagatgtttccgtacctgtcttgccggaaaggaatctccatccttttgagttcctctatgatgaatttagccatcttcccctctctgccagagggggaagaaatgccgtaaagagccattagtttttccatgataatgatattttaggaaatgaacaatttttcgatttgcaggtatcgtctgaattccggtacgggacgccctttacgaaagagaaaagacggatatttctttcctttatattccactgataatcctttcaggactttcccgaatacggtagatacatagtacatatcctgacagttcttgcagaatgccgcatccgggaagatatgtatcttcccgcatttgggacatacatattttttcctgtttgcacacccttccgtgctccggcaggtggctatgctcgtgtcgccctccgtatttctcagttccaggttaccgtccgtcagatgaaggctgtagaacgtgtcgaggtaaggcacccctttcttgtgccacctgcaggcgggcactttcaccgtcaaagagacctgtatattatctccggccgcccattcctgcccctcaatgggattcagtacggtgaaatccgtcgtatgtgtataatcgttgtatctgcgtcgcaacaggatgcctgcctcctgcgcctgcttgcggatcagttcgacgacgaatgcgtgtgaggaatagatacgatccagcagggaggcggcaatcggtgtgtttattgatttccacaatgttatctcgttccatacaatggcccgtccgaccacattgctgctgtcatcccttgccacgagtattttggctcctgcgaaattggcatagaaatccgctgcattacgggccttgtcttcatatctcatacaggagttgtgcaggctggattcgctaccgtcagatatgggactatagttgctttccagataagcctccataaaatcgttcatactgtcatgcagtctgattgtgaccttgctgtccagtgagatggcgctgcagaaatagttgatttcatcgggctggtacggtcccagatttttgaacagctcgataaacgtggacggttccagatctgtccggttctccggaaaccagggtgcctgcggattgttccggtccgggaaattgggatggcccaagtctttgttgcatgccgtgaacacgatccggattttcttgaacgtgccggcttccgtccgtttgcgtttggtggagaaaaaattgtaggacccccgtatgacttcttccaccggtacattcttttttacttccgaaaggatatctttggctatcacacttccgttttccgccgcatgggtcaggcgggatttcaattcgttgctaacattcagtttcataatcattcggtttattgtttataaattctgttgtttatatggcaattgtttcttgccaggctgcatttggcgcaatttctctttccgctttctgagcaggtcaacggacatgttcctgcttgtccgatattcctcctcactcatccggcgaatggagggaatgcccgtccgggtcagcgtatggtttaccatccagccgtccatgaagttttcggggcagaggctgtcatggtggatgacctcacctatgcagccatgtacgagcatgttgcaaacggtcatcaggcaacaggtacggctgacatcctctgcaaccagataattacccaggtggcgtacatgatatgccagcagcagccttccgcttccgcatgtcgggtcacagatacgttttcctgtcgctgtctcccccgaatcggtacataagaccatcaggtcgcagatatccggcggagtgaagaactgtccgttcacctgccgaccgcttttggaggatattgccatgaagaggtcaccgaacgcatcaaaccatccgccggattgcaattcccgctgcatgagccgtatccatccggtaagcatttccataaaatgcctgttctgctgccgtttgtatttccagtccataaggggcggtgcgccgggagagaacccgtgaatgacatagcgcaggaaatcgttgaaaacggatatcggatcgtagccgttcgaataggcgaaatcacagaccattttctcaagcggacgtatcgcctgcggtgtgttgtatggtaccatattactctgattttttatagattgttactatatgtcttttatggtcagtctgtatcctgacgggagaaatgccaaggaaagagagatgggtgtccgctttcagcatgttccattcccatgcgggaagttccttccattccatacggtatgcccagagtatgaacagaccgggacggaatccgttgaaaagctttccgtgcagaatcccgaccagccgttccagttcttcccgcgagtaaagggtgaatgcctcattccgatagacaaaggcatcagccggttcaatatccggctgacactcgatgaggtatctcttccattcttttgtggtgtactttccgtacagaggatcgggttccgtgtatttccatgccctgacgaatgtgtggaagaggacggcaccgttcctgtgccttccggtatgcccccacatccggaactgtttgctgcgtatgccatcgggaatcagcaattccggaccggttgtaacccaagggcctccttcggtattgtaaccggtacacttttcattttcatggcaaaaaggtgtctgtgggagaaggcagatatgaacttcccggtcatcgcccctttcaatgtgtgcctgcggataatagtcaccgccacgggtgatataagtgacaacgtctcctgcagtcggtaaaccggctctttccctgtcctcccgcatccttgaaatcagccggttcaccttctccacatcacattcctttatggagcaggcacacccttcatgcctgttgagcagagtcagactttccaggtcataaaaattaccgtacttcatattgagatcgtttttgttgatacaatttgacctgacgggcaaccatgtcgcagaacttctgtccgttctccttctcgcttctgaaataggcaatcatgtcccagagattccgattgaagtagccggtccatttttcgtaatagtgacctccatagacctttccgaacgtttcctcgaaaagtgcaggagtcagcccttcatccccgtggtggttgtattgccacagggagacaagcagcagctggttataatccagtgtttccatatctgttcttttttaagtaaaacatcggcctacatgggtaggcatttttatttcttgatgtctttcctgtctgttttccggggattgcggcaaggcttggcgaaagaaaataccgcagcgaagcgaggatgattttctttcagccaacccagcccctgaaaggggccgccttgcacaatcagcccggaaaacggctatctttacagcaagaaatgaaaaagcagacctcggattctctgttctgaagtctgcttttcggtcattgtcaagtttcatgtttttcaggtatgtatctgccatccgtggaacggctgcaatgttacggcaaacgacctgtcaggtattccatgatagagcagacctcccacgatacctgtccttccgtcgggatagtgctgtgtgaagccgaacgagtacggggcatggtcatagtagagtgagatttcgcagggataatcaggattcccttcccaactcttcaaccgttccaagcacttttgaagtgaggtgtcaccgatggattcggcatagcgctttacgttctcgaaatgttcttcattcaggattttcataacttttgtatttttatcagttaaacacgtccggctccgggagccggtatttttatttctcgcctgcctgacagtcccgtggccgtacccgcaaggtttggcgaaagaaaataccgcagcgaagcgaggatgattttctttcagccaaccccgcaggggcctgaccttgtacgggtacacaggacacgggactacctttgcagggtgggaaataaaatatacggttgttttttgttgtgggattttgtgtggattccttagataatcttcctgatttgttcgccattgccggacaaatgctgtatttttgcaatttctaatttcaggattatggaaaactatgtaaagaaagcggcggatgctttccttgtggagcgtccgtacggtatgcgtgtggattacaggaagaaaggattcgtgctgtttaaccgtaacctcaatgtgttgggaaatgcggaacagacccgtctggaagaactacctctggagcggttcaatgtggaggagattccgttggagggtgaagtcgtggaggaacacgcgggatttaccgatgtattcttctataccgatctgaccaatccctatgccggatatgtactgaatttgcaaaagcttaaagcctataaccggttgatgtttccgctggcaatggcgctgaaccgtgaattgtgaggccggaagccggtagcggtaacagctgcatggagcagaccgttaccgccccggatttaattatttgccctctttttctgttatgaacgccagatagacggacacggccttatggcatccggtaaagtccggagtccggcagcccttgattttccggaaactgacggttccgttcctgtcaatgcccctcacatgcctgttgaatgtccctttggttctgatatggatgtcaaaaccgtcccttccggtgatttcaaggaacatttctcccgtgatccgttccccgtccaggaatttctgtttctgttcattgagcagccgctgatgttgctcttcctgcactttgcgctcttccgcctctttctccttctgctccctgcgtttctgctcctgtattcttttatattcctcacgggcttgcaccaagggggtggtgtcaagtccgagagcttcgaacacgcggacggagatcaaattgacgaaggctcctctttccgcactttgaagcgtatccgcaatccagttcctgcaataggtggcggcttcctctctgcaaccttctcccttgaggaaccggcgtgaatactgcccgctagagaaataaacgttttcaatccggcagaccacatggaaacagtcatcgtcttcattcccgtattcgttctttctcgacagggagagatatacattctccgcgtacggctccagttccatataaggagccacgacggtattcccatcagacttgtacttgaatacttttgctttcatactatcgttcagtttgtcggttgttgcatatttcatctataatctctttcccgcttctttcacccttcaggaaggcaaggaagcgcctcaaaaagagccgggcacagtcagttcccagctggaagctttcaccgtctttggtagcacatacagcaaaacgccccagtccgaaactgtcctgttgtggtacgatgtggtaagacaagtcctcgcttgcgttgatgtgcaacccacgacggaaaacatagaaagttttcgggattcttctgtcggtatcgatttccatacgcttgtaaccgtgatgttccaataatcggcccagttccctgtttgtcggaattgtatgtccgatccagtccggccagcttatattttctattgtgtgtccgtaattgtcatataatatgttgaactgttcctggtattcatcgtaaaattccccgttcccgttgcacatttcctccaacgcgatgccgtttttacggacaagggcaaggtcgcccagtccgcacgcgatttcattgagcagcgtgcgttcctcatccctgttctttgccgttccgtaaattctaagccgggaatatcggtgtagcgccgaacgggacggcatatccagtttttcccatattccatcgtttcctatagcctgtctggtgtttcccggaagtccgtaccaccacttgtccaaattgtttgtatccataatttctgaatcagattgttttcaaattctgttttgagtaccatgcctgatacgcggcggcatactcctgacgttcccgttccagggaatttctcatttcaggggtgtacccgagcaggcggatgtatcctccgttatagccggtgggttcgcactttattccggcttcctccagtttgtcgatgcgtttttgggccatttttgcgcttgaatattccttcggccaaaaatagacttcgccccgtgagccgaaacagtcttcccccagaattatttccccggcatacttccggctttcgatgatgccgaaacgcgctttgcccaatgcctggcgcattgccttgtgtgccggaccttccggatgcttgaatacctccggcttgtctttgctgccgagtttgggcggttccaccttgtacggctgtttgtaacttccgattccgagcgtcaggtaaaagttggtatgaaaatagtccgtcatgggggcgctgtcatcgaaattgtacgacatgacgaaatcgcagatattcatcattacatcctttgccctgtccgtcaatgatttgtctgaatggatatgatggtggttgacatcgccttgaacttttccggactctttggtgaacgcctcgaaatccgctttcatcaaccggatatggatggagtggtaattctcccgtctggcagagaacttgtatcccggataggtctccttgagccatgcccgtaccagtcccacgatttccggagcgtgctgccccttgtaattgcggcctttccagcggtattcgttatacacatacccggtgtattcctttgccgtggctcccggatagtcatattcatatccggttgaggtcgagggaatatccggtttttctttccaagcctcaaaaagccttccaaactcggtggtcacctgttgcatgattgcggtgtcaccacccttgtccgggtggtgctccaatgccagccggcggtattctttcttcaagtccgccagagagtgtatgttctgaaaataagtcatagccataagttttttatgcccctgcgaggcggttgataaaatattcccggtagtcaagctcaaaaccgaggttgagacaggccgtttccatgtcatcttctctcaggtcgtccgcctcctgcaattcgcgcaggtaccgtatttcggagtccaggtattcctgtgcttccgtttgaccgcaaccgcatgagttgcagatcagactgataatgtttccctgcatgctgtttgattttttatgtttctgttcctgtttctgaggcctcgtccgtcatatatcgagacggcccgttccaccagaatcctgcggttgtcttccgagagttccaggtagaaccgttccgccgcgccgaatgtgcccttgtctgtcgccacgcaccatttttcccagaaatgcgggtacatgccgccatacacggctttgcattcctcctcgctccaggcgttccacatgtagtagaagaaactggagacggtattttccgcttgatatttcatggttcttctatttgtgattctacattgtttgtttctctcagttgatgccacacagcctcatacatctcatgaagccagtctatgttctttgcgccgagttcaaacgggctgtgacactgcacctcgtcaccgctttctttctcttcggcaaggacggtcaggctgtccgccgttacccggagtcctgtcaccctgcattcatatggttctccgttcttgccaaaccatatcacccagaccggatcataatcctcttccggaagacgaatttctttcatgcagtgagcatggagcaactgccgtatcgcgtcgatgatgtccccccgcagttccttgatcctgccgctgaaatcaacggcttctgacggtaaacttccttttccgcctctttcctgcaaggagagaatccgcgtgtcgggatggatacagaaatcccactccaacacttcatcgtcatcgcgtgtcgtgtggatatcgccgcccaaaacaagaccgcaatcgtcatttaccattctttttgcttcatcgcggtcttctgccgctaccgtgtaagtgccctcgaaggaataccttactcttatgtcatatcttttcatgattctttccatttgattgttgataccagattcattgcccggaaggattaccggatattcaatattgcgctaaagacatgtgggtcaagcctgtaaaacgtcggaaggttaagtgtgaccatcgggtagcttacccagccgctctgacgtttatagcctgtatcctcagccaatttgttggacagaaggaactccatggcatcaggattgttgttgatgtccacgaatgccctgtcaggcagtgagaatgccgccttatcttccaggttaaccgtcaggaccgtgtatatctcatgggtcacgggatctttcagagacaatgccggccagccgttatggtatatttcaatcacgattgagagacggctttcctgatacaggaaagtctcttccatggacggatggtcgcatttgataatttcaaaatcatcctcccctttggtaaatgtcaccatcggataggatacatcgacaaaacattcctcttcccggtaacagagatgttcttttccctctgaacggattatagccaatcgggtgttcatattcgtaactggttttaaaattattgacttgcaagttaattggtcggaattcacctgcttgtttctttaaacgtgtgattgtcaccgcctgcggacatttgggagagttgctgtctcaccgccttgattttcccgatcagttcgtcctcccttcggaatgagggggtacatttggtacgcctcatcccggctccccaggggatgccgccgcatacttttctcaggcgtgccttttcgctttccaaggccgactccagacgggccaacctgcgtcgcaacgattcttcggtcacagttctcatgatctcattgtttttttagtatggtgacggatcggaaagacagtcaccataccgtcgttatgtgtcacgttatattttagctttttcccttttgatgcctctcaggacgtacaacaggtgtaggaacagctccctgtcgtaaatccggaagaagaacggctcgcctgtttccctgaccgttccggtaaacgacacggactcccggttcacgggatattggaagaagttgccgtttgccagcagggtgtgctttttcttcatcacttcgcctaggaacctgtccatatcgtcgtttccctcatagccggagaagtagaggaaatgatgacggcgcaggcttcgcaggattttggcggtttccagcctcacatccctgcctgacgattcgtccgttcctctcatcaggttgcagatgaactttttctcgccatttatgtcaagaaacagataaggaactataattatagaggcatgccgtgcgtggccggagatgaccatcggcttttctttctggatgtctcctttgaaggtaatgttccggtaatggttgtccatctgccgttccagctccttccttggcgtggtaacggagcggagtcccgtgaagtagcgtccgcccgcccggaaacagaaccggtagatgtccgcatgataaggctctcccaggaaaaagaaattccgggtatggcggatggggggcaagacatccatgtagtcgaaatatctttcttccgtaatctcactgaacggggcgcagagggattgcaggtggatgcgtatcattttgcggacggtatttccggacacggctgtgagacacgggttcttttccctgtctctcagttcctccagtgtctcatggtggtagtcgccgtgtattccgtcagacatggtggtcacgcagctgccgtcaaaactgcgtgaatcgactacgaatttcagtttgtcgttattcatggttcagatgttttgaaggttcaacactcttttggcggcactgagggcattggaggtgagctgccgttgccatgccttgtttttgggtgaccagcggaatccggaggatttcagttcctttcgtctgctgtcttcaggaatcctgtcaaacaggatctgaaggcggtcttccccatagttccatacaagtgtcccgccctcgaacggcacttccttgttttcccggctttgcatcgctttcagcttttcgcgcatccgttccgccagttccggcaattggaagaatttgtttctcggtgtgatgacgggtttcttcacccttgcgttatattcggaaatgaagtccacggccctacggacgatttccacttccccgtgattggccaaagtggataccttgttcaggatgctgctgacaaacagggcacggctatagccccggcattgtccggtatcaatcccgtggatggtatcggcactgctcttgatgtcgcgtttgagcgtctgccatgccttttcctgtttctcttcctccggtcgtgcggcttcctttttccgtctgacggtttcaagaacttttttccgccaattgcggaattcttcgtaacggttctgatagcttctgttcgttttttcctgcctgtagtaatcaaatccgctccgtcccgtcaccatcgggttggcacagcgggagaggaccgagagctgggcggacaacttctgccggtaggcggcgatgtatgtatcccgttcctcttccggcatgagttgcaggtcgttgtgcagcccctctccgtaaatcatgatgtccgtctcgccgcgaatctccggattgaaggaactccaggcgtatgcgtcgcaagcctgtttccacatatcatccaaataggcaggatgtttgaatgctacggcttcccagtctttgaagtccttggaatgcaattcattgtgatcttccggatttccgtacaggtgtacatagttgcccgttccatgatgctcctttctgaaatggaacggtacggggggatagtccgtaccttttttccggatcatcgtgaccctgtgtgcattctctatggtaaggtctgctacttgctcttcgcagacctttgctgttgtttcattcataatcattacttttttaaatgtcagccgtaaatcatttcttccagttcatcgtccgtcaacaggcggatctcttcgtccgaacaatagtaagcgatttcttcgtccaaatcgaatgctgtcggatcaaggcttctgatgccatccagcagttcctgttccagtctttctacggaaaccagatagttcccatctttgccttgcacttcccgtgcaggatagctcatttcccgataaaccaacatcgtcatttccggattggcttcctgctgtcctttgcttgtcgtctttctgttcatacctttatttttttaagtttgacatgatcggctccatggagccggattttcgttttcttacttgcctggctgtcttttgtcggggattgagcaaggcttggcaaaagaaaataccgcagcgaagcgaggatgattttcttttagccaaccagcccctgaaaggggccgccttgcgcaatcaacccgacaaatggctatatttgcaggtaagaaattgaaaggacggcaggatattgtgaattatagattacaaaaaaagccatccctagggggacggcttaatgactgaatttgtatacttattgtgcaagacgctccttcacgttgttcattgcttctttcaggctgctgttcatgacccgtgcataatgctgtgtcatacgtgtggaggcatggccgagcatgacggaaacatcttgaagaggcacattgttggcaagcgtgaccgtagtcccgaaagtgtgacgggcaacgtgcgtggtcagattcttcttaatgccgcagaaatcggctatttccttgagatagctgttcatcttctggttgcacatgacgggcaaacagcatcctttcttaatgcaggtcggatgttccttgtatttctccaatatggccaggggtacgggcagcaatggaatattgctgatggaagaagccttcctacggtgttccaatttgacccttccttttcttatccaccagtctccgagattgtcctgtaccagattctctttgttcagactggcaacatcggagaatgccagaccggtgaaacacgcgaagacaaagacatccctgaccagttcaagccgtggaatggtgaatttctttttcattacggtctgcaactcgtcataggtcaggaataccggatcggtctcgtcctgctccatcttgtaaccgtaaaagggattcttgcgcatccattcctttgccaatgccatattggtaaatttcttgaagcatttcatataacggactatcgtgttccggcacagtcccgcctccgttttcaggtagatgtcaaacgcacggatgaactccggtgtcagctcatggaaagtgacatcctcctttccgtaataagaggggatgagcagctgtaatttcttcaccacgttcttataccggttgatcgtgacgggagagtagtctatacccgccagtatttccatttccttgatgccttccctcatggtgccgagcagtgtacgcatttcggtgtctttcccgaaaacacgtttaagaatcagttttggggtaatcagggcctgttccaataccagttccttgtgtttttccaaggcgcgtgcgtgcagttcggcaatataggcgttcagtgccactgatgccctgtccctgcctttactgcatcctttggcggcgttccataagttcaggggtacgcttctttggatacgtacatcgtcatagtctccattgatggttatccgcatcaataccggtgcctcaccgtttttcaacaatttcgttttaagcacgaaaaacagaatgttcattgttccttgtttcatcacttttgttttttgaggtgttacattcaattgtttcgtcaaaaccggatggcatgaggacgtggagcgaaatgttaaattcggtggtttttttgagggacttgtggaaaagccataaaaatcccatttttctcaggttcgaattgccttttgtatcccgggttcgattccttttttttatcccgatgggaaataccgaatttttaaatttctttcactttttcgacttcatccggtcatgtgtgcaaaattactttttcacaccggagattggaattgtcaaacagctgaaaaacaatgaagtatggtgcgtatttatggctttttcaaaagccttaaaaaaagccactgaattggcgaaatccaacttcacaaatatgtagcggaatgcgtagtgagggtaaaaaaagaacccttgaactatctctaattcaagggttttcatgtgtgaaaagcatttatgtactttctttggtggtgccaccaggaatcgaaccggggacacaaggattttcagtcctttgctctaccaactgagctatggcaccaagtcagtggttaagcacataggaacttacttctcagcacattcaataaaaaaccttagcttctcgtttgtggttgcaaaggtagacatattttttgattctacaaattttctacaaattttctgtgaaattctttttgatttcaaaaaaatgccttacctttgcactcgcaaaacagaaacggaatgtagcgcagttggtagcgcactacgttcgggacgtaggggtcgggcgttcgagtcgcctcattccgacactgtaaaggataagccactgaaaatcagtggcttatctcattttaagcaaatccgccgggacgaaatcgggacgggaattattaaccatttgtttctgctgttagcaaaaacaaataaaaaaaaatgtccaaaatccaagaaatcaagagttacacaccacctatattacatacgggtaaagattggtacattgacttttacgcattcaatcctgttgacggagtgatgaaacggaaaaagatcaaactgaacttcatcaaatccgttaaggaaagaagggcatacgccaaaggatgcatcaacagactatcagaaaaactcgcaacaggatggaatccttggattgagcaagaatgcggcaacgcctttctactgttcaaagatgtaatagacaaataccgcacttttctcgccaaaatgcaaagggacgggagataccgacaagaaacgatcaaatcttatagctcctaccttcgtaatatggaaatcttcaatgaagagaaaaaggtccctatcacctacatttaccaatttgataaggatttttgtgttatgctgcttgacgaagtgtatataactagggataacactgcatttacgcgcgataactatctcggttttttgaagtctttttccaccttctgtctgaaccataactatttaacacagaatccaacagccgggatcagtagtctgggaagaaaagggaaaaaaaagctacgcaacatcctgccaccggaaacacttgcaaaagtgagcgactacttaaagaaccataacccctatatgttgctggcaagctatattctatactattgttttatccgaccggcggaaatggtaggattgagattaaacgatataagtttgaaaaagcaaacaatattcgtatcagacaatatatcaaaaaatcgcaaagatggcactattacattaccatcaaaagtcatacatctcatgttggacctgcacattttcaacaatcccggtgattattatttattctctgacgggtttcgtcccggtaaaacaaaaagatctgaaaaaatgttccgggactggtgggcacatcatctcagaaaagatttaaagctttccgcccaatataagttttattccttaaaagatacaggtataacgaatatgttacgacattatgatgtgttaagcgtacgtgaccaagctcgtcacagcagtatattgatgacagatatttacacgcctcatgatatacaggaagccaatgatcttataaaaaattatcaaggagatttttagtaagcagatatcaagcggttacccgtcgctgggccgcttgatattctaaaaaaagtaaaatatgagattttatttattatcctcaatcttcgctttgatttgttgaagtaatctaaaagctccggccatcttatagttgcccagacattgcttggcttgcatgatacaggattcaacagtaagtttcaaatccggtgtgaaagcggatttgttaatctgcatttctttgggaagttcatcagcatggttgttgaaccatacgatcattttattcaattcctcttcggaataagattcttttttttcagccataatacataagttaatgttagttccggcaaagataacaaaaatagccccgactcatcacgagctggggcagtccaatttataaatttaaagtcttatgatgaagattgtctattgcgccaatgctttactatcagcataacgacaatcaaaacgattacacaaacacaggcaaaaccgatttgtttaagcaaagtggattcttttttatcctttaccccttcagtcttggtttcttcatgtttggtggaagtggtttccttgtcagctttcacttccgtactgtctttgattgcagtttccttccttttattcttgctgaaatcaccttccacatgaccgtctgccaataacggaggtttcccggtcaggctatcgggcggttttcgggtatcatagatacagaaatcaattacatagttgccattagtggttatcagctctcttaaagaagtagcagacccatgtatgatgttgaccgtttcactggcactgtccttcctgattacttctgtgtcagatttgacagccttatgcgagctgccacatgatccgaacaacaggaacaaacacatgaaaggagccagcaatatatgccggcttacccagttcataactctaaccaacatagtctacaacttaagaacttgcatcctgttatccccgtcagcccgataactgacgtgcacccaagcgaagttagactcgtcaatcaattgatcatagggcaggttcttgcggatatattcaaataacagcttgttttgctgtctgtccccagtgtcaatatcagcagcttcccccttcatgtgctgcgaggtcttgcttcccttgacagctgcattaagttccagacagcgatagccactgtttactgttattggctttccccaccatgtgcgtaacggatcaagcacattatccaccaaggcagtcagagcagtcacatgctcctgtctgcatctgttattgatacccaagcggtcagcagttgttgacttgcagagttccgcaatcgtaaaaaacttcatttcttttcctccttatctttaattaatgtagccctgcgtggtggaatacgacggccgcattcgctgtcgggcctgtcacaacggttatgttcggcatctttcaattgcagttccagctcgtggcacttatgaatccatgccagcttatcagactgttcattacgaagctcaacgtataacgcatcaatcttggcgtcacgctgggcgatacgttcttccagccagtcaacctgcttgcgctcgttctcatcctccattgaatcggcggacgcatcctctttccgtgcgttcgtcttgcggttcacccagaacgtgacaccccaacggacagcctccaatcctccgaaagccccgattatagccaaccagtcgtttaattccattctgtctattgtttatctgattataatactacttcaaagatatgtctatttacttacgtcattgttgcagaattacttaaatccattgccacgatatgacaataaaaaaagagcccgatgacaatatttattgccatcaagctcctggttacactgcaaagatagtgaaaactattccatattcaatccatattgaaaaaaataatcaggagcaatatttcgattatccgaagaatttaaagagtcacaatattaatagaaaacaaataggattcatgaaatctaccggttgtctataaaatcagatgttctcaagcctttatcgggaaacatctttacttttttccttttcctttgaacatttttcaagtcacgcacaatggtgctggaaagtacctccgaataaatctgtgtggtctttacggaagtatgtccgagcagcttctggactgttgtaatcgcaactccctgatgaaccagcagggtggcacaggtatgacggctcacatggtaggttatccgctttttgataccacataactcggccagctttcgaagctgcttattcacttccgagttacaaggcaaagcggcaaaacttccgatatccggatagcggtcaagaatgcccaatgccctgctttcaaacagcagatgtaacggcagacggatttccacccctgtcttgacggatttgaagtacagccaccgcttgccgtttatcctaatgaaattctcaggtgtgagctggcagaagtcagaatagcgcaatccggtataacaacagaacaggaaggcatcgagcacatgacgcatggactcctcttccaccttgaccgtttccagcttcttcagctcgtccggggtaagaaactcatgtctgcctttctcctgtttgattttgtactttctgaacggataagcatctgcgtgcatatatccctggttgattgcttcattgaccaaggtacggagctgtctcatgtgcttggctatcgtattgaccgcattgcccttttctcttaagtattgctcaaaatcacgaaggaatgtataggtaagatccttgaagtccaatccggaacggaaatcatgcaggaccgccagtgtcgagtgcaggttgtccttggtggactgcttcttgtccgaattgtcaatggctgatttggcaaaagtggagaagctgacattcaccgtacttttcttcttgacagcatccttcagtagtgagagtgtggcaggtattccgcgcttccaataccccaactctatgccttgcagatacaggatgtattcatagagcattgtgttgagttcgttagactggggatggttaatgacttgtgccccctcacggctccagcactccggtttgaggtacacgtttgtcttcaagtagattttcctttggttcaaataggcttcaacctgtacaagagccgtgccctgcctgttaagtgtgttctggcggttatatacaagacggtatctgattttatccatttttccgcaaagatgcatcctctgttccaagctgcaaaatttagccaataaaaaatacaccctcactttcgcaagtaaagatgtataatatctataaaaaaatggtctgtgaaaaaaacatttgtaaaaaagatgccattattcatcacgaacgatagcatctagacatttttatcagcaaactcttttagtgatttagaataatgtttaattcaatatagatgctacaaagttatatataaattttgttttgcccaaattattatgtagttgacgtacggtatcaaaaaggcaggattcgccaatcctgcccaattccatacacaaatctttttattaattaaaatacctcacggcattcaaaaattaataaatgaaaaaacattattaattgtcatagcaaagctataacaaatatttaaaaaagaatcattatatgaaaaaaagaacagaataaacgatatatagaccaacaaacatttaaaataatattgtaatacaaaagtcattgatacaaatccttctggaagaactgattggtgttgctacgagtgaaaaagatggattgatgccatcaattcaaagaatgaccacttcatatcaaaaagaccagcagaagtattgtaaaattgccgaatttagaaatcgtttaacaggaatatcaatgcttatttcagtatttaagaaccatgaaaattcatctccgtctgttgttttattaacaggatatagcgatgatctatccgttaattcgataaaaagaggaatctatttaactaatgtttattatcaaaaaaaagagaacaaaaccattgtttatgtaaaatcatcagcatacgtgtatatcagtacattgtgcattggcatgaatgggtcgctcaaactaagccatgaaaacaatctagatttaccatccgacgcaatcgaaattcctatatcttgacaagaatttagcaatatttgagagctggaaggactgttaggagttagcagtagtactatatttaaaggaaaagggtatatccaattaaaaactgaagacgatattgataaagtgtatgagcctggagtatatgcaataaaaggcacttcatacaatgatcaaacgcttcttgtcttcagtcataatctgggacagtcaacagtacaatttagaactaataactatggtggttttttagtgtttagaataaaatggtggaatggtggttggggaacctggaagacggtttctttgacataaaatttatctgtttgcacttctggaagaactgatgccgattgctaatttaggaagtaaagggctcttgagaaaaggcgttctttctcctatattggtttgcaataaagactccgttcaagaagtatgtgtcgttcgcctagcgagttcatctaacgcctatatcggtatgatattgtatgtatattggggtggttctacaggtctgttctttattaatagtaagactggtaactcctatatcataaggaaagtcaacggtagtatgatttctgaaatagagttcaaacgaaaaaatgatcatctcttcgttcggagcaagacaaacacagcttcatttcgtgtaagtgctttgtttttggatactactggggttgacctgtctttatccatgaatatagttgatgagaatctggatgatgctgaagatatagaaatactataattctttggtaacatgaggagcggacgggtgtggaccggcacccatccgttttatctcattaaaatatgacttatttttaatactatgttgtttgtatttgtttccaatcagtccaagttccattattacatattcgaataaaaaatctgctctgaaaatctacaaaagtttgcttgatggtgacctcattaatagcaatcgtttccaagaatccataattacttgatgtattgggtttattatccaatgattgggttttatcgacaaacatatatccagtattattagcttcattaaaatcagtaatttcaccaaatctccttttgtaccacgtatcatttatccctaatagtccttccagtactgaggcattggctttcaacgcctcacttaattccatcttttccataatattttttatttaccagtttccaaattgtttttcttataatcctgccatgagtcggcgagctgccccaccgaagcggaagtgtagaggtcaagtatatgaatctcgtcatcggcaagctccacaagctcgttccgatagatcttctccgcaagcacgtgcgccggaagaccgggcacgttcctgtaaatgccgtcagcaatatccttacggatatccgctatcaccatatcctgtctgtctatccccgtgaacaggggaaattttgtaaaatcaactttcataatattcttaattaaatactgttatccgcaataaaacataacccaataattgcccatacatttaacgaatccggacgcataatccagatcaatggaggacatctcttttcctccgggggcaggcaggatgcgcccgcctgtcagtcttaccccgccgctcatacgtttgaagtatatggtatgtcccggaacatccggaggaagtgtcacttctatattacccgtattaataaacatcacattgtcatcattgttattcagggaagtgctgacggatatgttcctccagttccccactatgccatgaagagacacataactgtcattgttcggatgaaggaaaatgttacccccctccacgaacagaggaatgctcagggtcttgatgtgcatcccgatcatggcattcggactctgtatgtcaattccggcatcatacgatatcccttcgattgtgacaaatttcgtgttccctccgatttttacacgtgcaaatgtcctttcgttataaaactctatctgtccggcggataggttgaaaccgacatgggaatccgtcccctcataaagagtttttgaggacaacataccggaatctatggaaaacggaccgatacgtccgctatccgccgtgatttttccgctgatatccacattgaccgccctgataccgtccgcatcaatcatggacgccttgatcttctcggtcagcaacagcttggtggcgataaaagtccagctctgtgctacctcccagtattttatttttcccgaagccacattctgtttgggggtttccgtcgataccgacgtatgcgaacggatgcacaggtacagcaggttgtcataaagtacaatgtcgtaaaactgctgcccttgcttgccctccaggtaagacacagacgcctcccatacacgcatacgcatgcgcgcccccttatctcccttgtcaccttttggagcaaaactgacctgtccggttctagtcaccaacggcatatcacctccttattccttggttgtgatggtccatgccacgttgcctcctgcctgctggcacatgtcccaagtacacgtgccggaagtggctgctgtaccggaagtagacgggttaaggactactcctgcactgtccatgaacacgaaatagaaagtcatgtccttgtacttggtggtacttccacgcttgaccagaatgggcttatagaccaccgtgtcaccactttcccggatggtctcgtcctcgggcgtgggattcaggatcaaatcaaacggatcggacgcatccattacggactgcgtgtcctgaccgatgagcttgccgccctggtacacctccgccttgaacacacctgtcgtgtcaaccatatcgttggtgacggtcaatgtctgtgtggtctttccgctcagcacgctccacgcaccgttgacctggttgtaccacttgtacgccagtccggtagtgatctcgtcactgcccatgcgcgctacggctttcagaatgcagctctgccctttgtcccgaagggtaaaatacttgttgtcaccggcaatgatcgtcacatgcttttggtttccgacccccttggtaatggggatgctatagacgaactggacggtgtcgctggtattcccaacggtcacggtggcttcacccttgatggtacaagaggccgctccgctcgccttgaccagattcttgacgatctgcaatccgtagtaatccgtcgtaccgggctggtaagggataaacttgaaatgtcccgtctcaccgccaaacgtgttggtggagacattgcccgagaacttgatctcgacatcattgaaataccatttcatggaggaaggaaccaccagcccttccgccacccgcgaagaggtgagaatgaaggacaagacgggcttgagcgaagcgaaatccggtgcgatgttcgtcggcgcggacgcttcgcccatatactcctgatacagatctccctggttacactggatggcaggcatgtatacgccgcccttttgcgaaaatatgacctgtccggtcgcgctggccaaactcatgacgctcctccttccccggtcgtttccgtactatccgtgccttcggagctttcggtgttgtcctccccccaagaggcaggtgtgaatacttcgacgggatggtccgtaccgtctatctcttctttcgccgcctgcggggtcaggcagacgccgcccgcttccttggccctgtcaaataccgtgtcgccggggaaacgtgccacgtccgcctgccacaataatacattgccatccgctgtcctgttgcggatatcggtcagatgcaaccggtcggcaacctccttcgttactttaatgtaaaatgccataattctattgtttttaatgttatccaaattttcttactactaccgccttgcccccctgtgtgagcaccttgccgccttgtgtcagcgccacgtaagggcctctgtcctccacctccagctttaacatcatgccgttgctgaaaggtatcctgggagagtatccgtcggcaaccttggcatatccggcatctccgctcttcttgacgtaccagtggcagttaaacatggcggatggattcgggataacccccatggtatcccgaatgacgggtctgggaaagatggcgtaagtcccatccggaacacccgtaggtacgccctcccagtcggcttcaatcttcggaatcctgcggcgtatcaccgtagagactgccgggtccgatgtgcccggggttgatgccggagtcccggaagccgcataggtggccttgcagacaatcgtgatgtcatcacctatataattgcggtcaatcttatatacattcttgttcagtgatacaaactcccagtcgttgtcacccgctcctgtggttatcgcctccagcgctcccgtagacaacagacggtaccagaagaacttgcatttgcccgtagccgtcacgtccgtgtcgcctaccatcagtttagccgtgatggtctgtgcggtgatgtcacgcaccgggttccagtccagcgtggacgggctgtctatcgtcaatacggggatcgcatccgtaccgtcaaccgcgcggacaagacagctcatctgaaaagtaaacagctgtccggtacgtgtgtcggcatattccgcgtaaaactccagcgtgacgggttttaggacggtgacattttttttcattgtgatctgtcccttgctgtcaccggactccgtaatgctgtagcctgtgtttgtcgatgtgataagtgtgcgtgtggttccgatgcgctcgtaccacttcatgttggtcagcctggagttgaccgccccgattttagtcaccgcttccggatcggtggcgttgcaccgcggaaacaggaccagcggtgtcagcgtatagtccggagtgtattcagctttgtcagcctggtagacctgcatgtccggcacgctgcccaccacctcgatgttacaactggtttgtaacagccggtagttgatttctatttttcgttgctttgttgccattgtataaaaccattttaaaatgttacaaaattctccgccacttcaaactgctgcccgtcacgcaataacgcctgtgctttaaacgtacacacccgcatgttggtataattcggtccgagatcatctatcgtcagaggaagatttttcccggcgccggcacgcttcaccgcccatgcgttatcttctgatacattcccggtatcacgcgtccagctcacatcagcgtcaagtatatgatctgtcacgtcacggttgtacagcttgccggtaatatataacgttgtggaaaaagtctcgatatcaaaataccacccctttgtgctgccgatctctatcgtaaattccgggttcccttccagcatcgcccatccgaccgccgcatattgcggttcgtcggctgttcccgtcatcaggcacttccatttgcagccgtagtgccaaaccgtgtccgcccgctcctgcgtattggtgtaaggattgtcagaggacgcgacttcggccgaccaaaaaccacggtccaccagttcctgtacgggcagtccctgccagtccacccggtaaagttcaccgaagatgccggcacgggcgaatatgtacgagtgcttatagttgacggggagattgtcgaacaaatccaaattgggcaaacgccccaatatcatgtaatagttgttctgttccaagacaggcttcgttactccttccagccagacaagacatttatccgtggtggcggacaaataccagtagctttgcctgtcctcattgaaggcgtttcctcttctggtaaagatcgtcaactctgtgggaggatagtttttaccgcccggcacctcactgtccgggtatgacaacaccgagatggagttggccgggacattcttggacagcacgcgcatccacgaggcgtaatactcccccgtagaaaagaggttgtttacaatcccgtacactatatcaccctcctggaatgcggtgaagtcattctcccagcgcttgcgcaatttcagggtataagttccgtcgctctctaaagccacggactcaatgactccgttctcggaatatgaggtgtcgccttcctgcgcgttcagacggttatagatgatttccttgaacactgcggagccgcgtacctcaagacgctcgaactgaccgcgcccgtcaggatagataccggcacctttaccggcaatcatggagtcgatgaacttgccgaacttcaataagaaatttgttccgtccgcttgatccttacgaaggaacattactaaggagcgcaatgcggaatacacgttatggtctgtcgcaggggtggagtcgtggcttccgatcacatacacaccgctgccaccaccgcccgtataggtctgtcccttcagggtaaggctctcaaccttttcctccagctccccgatacgggaataggcggcggtttccccgacagtatatataggggaatcataagctaaatcaagattgaattcaaatccgataacccttgactgcctttcgttctcgaaataagccttgttgataaggttgaccttttgaccgatgccatagaaattgtgaatgccatcctcacggtatgcgtcatttgacatcatcgtgcagccataggtactcgggtctatcttggatttggcagcgtacttttcagtcttttccttcaactcctgctcggcggcacccacaagccccagctcggttattttcgtactgtcccagccggaaagcacatattcatctccatcctggggaaagagcacatcaccgggaagcggtctgccatagtcctcattcctgactatctcccaaagctgtgcctcagggttccatccgccatcctccaatttctccggctttccctcaggattgaacttcacggcaaactccaaaccgttgagaagtccggacgcgaaacgtatcctcagctcctgaccggggaggatatatttctcggaaaagttaacacccgtgtccctaaagcggtaggcattccatttttcctcggtggttgtgccgtcctcattctccaccttgtccgtcacttcgatagtggtgacatccgacatgatgcccgttcttcggggatagacttcatcgaagataaccacctgctcgacagcttcctcggtagtcatatcaggataagcgtcaatgtaaggagtgccttcgggaagcattaagcgtttttgcaccacgccgttcacaaccacggtctcatcaaccggacggtagtcagatgggatattctttgttgagccgaaagcgtagatacgggtggcataggtggactgggattctgactgtgacatttcctgcacgtttttcccgatctcgaaatccaccgcgtcaccggactcacaacgcccgaaatggattatattctcggttatccagcactcacagtcccatttctttgccatctcaaaacaagcgtcaaggatgttgatgttgtcgtaactcatcaactgggacttattttcgactgtggaatcaatggagaaaacaaaatcctgtcctttgtatgtgtaaccaagagctttcaaatttctaaggactataccggcttgtacgtcaagcggggcggtcaggttccaggacgcctcctgtccggccgtctccggggtatatttgaagattttgtttttccatttccagtagtaggcgtcaagctgaagctcatagtcgtatgccccggttttacggttgtacttgggtttgtacagatcgcatagttcgaaccgtccgaaacgtgtgtcctccgtccagtcgcccagtttgaaaaagacaggagatttcagagagaacttcaaaagtataaagtcctccttcatcaaagtgaacttacgtttgctgctttttctgacaacatcctgataacatggtgtaccagctgaatttctgatctcaattttcatacaatatctttcctgtcgcccggattgggttctttgagtttgaccataaacttaccccggcattttccgtaacttccatacttgccgcaagacagatagtacagattgtaaatctttcccagtgccgggattttcagtgcaattttaccctttaccagttcggatacaaaggacgaatatttatccagatagtcactttgcgagtttcccgtaataaaaaaaggcagggtgagctccctagaatccatcttgcagatctcaggcgatgaagtaatctgtatgccatgttccaacctgctgtcattttcgatatagtccttcacaggagggggtgtcagtatagcctccaaagctccgtccatcaattccgcaccccatgtactccagatattcctgccattaataaaagcattcctctccataatcacattccttttgtgtttttttctatctcggcaagagtgtcgtccatgccgctcaatatgccggtatatttttcaattttctccaaatgatcgttgcattcatgcaatacatcgcgcatttccgtgacacacaccgaatgagcagcaagttcctttgccatattcaatgctgccgtggaaataataagcatattcgcattcatttccgttcctttggttcccaaacgtacattagactcatacatggctgtcagccgtccgctgatctcctcacctgtttcctggctcatggtggtggaatatcctttggaagaggattgggaataagagtccccggatgcgtcccatccgaagatatccgccagactgtctctctcggccagcactgcttcagacaactgttcttgcatctcacgcaatgcatcaacctcatctttcgtataaccatcctcaccatattctgcccaggtttcatatagttttctgacctgttccttgtacttgtcggccatcatggctctgataatggatttgcggagctgttcctccagattctcggccagttcttcatttccgttctccagatcggatatcatctcccagtaagaatcctcaaaactgtcaaaggatataccggtaacctgttccttcaccgcctccagtatttccttttccgtttcgccatatttgatgatattttccagatggttcctgaactctccgtccataacagaccagaggccggcataattctccctgatggactgcaagacttccggggacatattgatcatatctttcatctcgttgaacgtcacaccgtactccctggatatctccccagcgacatcacgccagttctgtccttcccatttgtaggagcctttccacatcctgtagccctggctgtgacttccgatactgctgccggcactcagacgtgcctcggcaagtttcttttgtacatccagctcgttttttgcaatattcagagcttcctctccggctttggatgcttctgcaccgtaactttcatttatatatgccttttttttgtcaagcagctcgtcccagatatccagtagattatcatactgcgccaccatctcattataaccggaataatcagcgccatggaaaataccaccggcccccttgatcccaaaaatggaccccaccgtatcgaaaattcctcctacggcattgctcacagtttccagtatatttcccacgaatttgtcaagcccctggtcaccgatttggtcaagtatggccaggatggcagcaataatcccgcctatcttcgatccggattccgagagtacgtcaaccaatgacccgacactatccccgaatgaggaaagacttacatccgcttccccgagctgtgcaatggcattggtgactccggttatattgtctatagccttctttgatgacttgtccacattcgttttcgcattcgtgacattctgggatgctgtattaagctttttcttcgccacctcctgctcggcatgtgttccactttccaaggacatattatattcatcctgagccttggtcagttcctcctgagcttttctcagattgtccaactggtctggaagatcaccaagcagtccgcctttgtcaataatggcggattgtatcccgtctaaagcttcgtcaacaacctttttttgctctacagccatattcttatactcatcggattcacggaacagtttcaactgtgccctaactttgtcaagctcttttttagacaccttacttaaatccccgaatatcaactcccaattgatctcctgcttcaacttctcaacatccagggccgacagagcttcctcaaactccttttgcagggatgcgatcctgcctgcatcagactcactatccatcaaattcctgtatttgcgcgtcaacgcctcctttttcccttggaaggtgccgtatttgatcagatattcgtcccatgcactttcctgctcacgcaaaccctctttcctctgacgtctggtggtgttgctgatgatcgtgtcaaatgccgacgtatccacggacaccgagtacgagtcaaaggattttttcacataacgcttgttctttttcgccttcagttcctcctcggcctcgaacttttctttctcaaatcggattacagcctggatatagtcatccttctgccgccgcagaagcgatatctccctgcggttgtcaagttcccgctgtgccagttccttttcagccccggcctccatagcatcaatacgggtttgggctatccggtattccagttcctcctcctgacgctgacgctcctgcaaatgtttcttctgcaagtcctccagtttcacactctgcgcattaaccgcattggctttctgaggatccacctggatatccgtcttgccggaaagaatggtgcgggccatgtccctgtactcgctgtccgcatttttttcgtctgcaagccatgtttccagctgtttcttgttcatcttgatgaactcatcccgcatcttgatcctcttctcgttgtcctccagggacttctccagactctcaccccgcagttcccggattcggagctcggcacccttgatcatgtcgccatacttcctgacatcatcatcaatacgtgccagtgtgcccggagtattatcgaaccaggaggtggaatatccggtattgctcatggaagaagtcacatacacccctccggcctgctgcgccttcagcgcgttctggtatttcttcctgtattcctccagattattctcctcttccttgatggcttcccggttcatatattccaacagtaccttctgctgccgcacgaactccctggctttgccgctggaaatatccagtgcctgtccatattcccccactttggttatcactccgggaatattgtccgtgattttggtgatgatggaattaagttcggcctgctcatccgaggatagtctggtcttggtcttcagctcatcataccggtccagcaacggcatatactcggaataaaggtttataacccgttccttctgttcataaaacttttcattggcggtggatactgttgtattgacagtttcagccattctgtttttcaagctgatccataaatctccaagccaggacaaccgtcttcctagtttcaatttggcattttccaaccttgcatcagcctgagcagccttgtcagatgcggatacatacaattcggattgtgttagctggcggtctatgatattggacacccctttcatgaaatcaccagttttggcaacctcctcattgatttctgcggcggaaagtcccaggttgtccagtataagaagcgacttgcgccccagaccggtcacaatagagtctgtcatatattccacactttggccggtctgctgcgccttcaactgggcgaatgccagatattttcccatatcatcaaccgggatccggaaatcctttgccttgaccgttgctttcatcagctcaagatccgacaaggtttccttagtggcagtacgaaggtttgcaagaagatcagggcggtccaacttctcaaatgcatgaagaactccgtcagcctgaatggccacctccacactttccctgacaaattcctttgctttggacatgccgtttttgaaaaaatcaagggcagccgctccggcggacgcaaaaaatcccaccaccatagctttcatattccccagtttcaggaatgacccggaagtttcattggttccgccacgcagacgggccatcgcctctcgtgtttcctccagctgcttttccaaacgggcatattcttccggatgaagggacttgacagtattgtccagctgtttttgaagcccgcgggcctctttggccagttccgcataagttttctcggtgctcttcatggaggagcgaagaatcttcactttcgtattattatcggatatggctttggaattggaattcagctctgcctccagacgtttgtactcatcgctgcctttcttgccggaggctaccagttctgtcatcgaattgcgcaaaccatcattcgtccgttgcagctcacgggaggacgcgtttagacggttcagttcctcacgggcctcactggtattcagggagagggtgaactttatataatcatctttcagtttcttgttcatacggttacttttcagcaaaactagtaaccggcaaggaaggggcaaaggacgggagaaacatgagaagccccgcatgtccatggacaacggggcaaaatatcaatgaggacggtatccgggacgatgcgcactgtcattcccgtccggccagggaaacaacttctccagccggttgcggatctccttgcggagtgaatcggacatgcccgctctcagatcaggcaatgcgttgttgtacactatcccccatatctgacggttatagatacggagatcgcgtttctcccgcatgtcaagaaaacgtatataaagagggtagcccgtttccagcattatcggatccacccccgttatctggaactcggccgccgcaagacggtcacgcagatgacctgtacggccgggcacaattttatccgggcggaatctcaccttaagttgtcttccttcccggtaaatacctctttccgcaatatccaactgccgttgataaatggtcttgaagtcacgggacagggttcttttgaagaactcctccctcacagggttccatccgtcactcattccgtaccaagtttaaacgacacactccaaccgctgtaatccgtatagaatcctgtttccggggtagtggtcatccggtcaagattacgcataagacagcaccccctgttcctgtcaccacgcatcacattcttgatgctctcgacaaggggctgtgtatcttccagcacccgaaccggaccacggcgctgcatatccatacggtccatcagaaatataaggcacaagttatcctcctccacattgtccggatccgtacctgtctcctgtgcggacggtacgaccacgaacagaaccggaagctcgtcagaactgatacttttcagacagtcgctcatgtcctggtccacattcactactctgacggaatgtatgcctggtacacgccgcatgacattctcataatactcacgataggttttcaaactgatcataggctctatcttttggaatgtaatttctcaaacttctttctgtaaaggaaaataaggatatcccagaacggtgtcgccctcacctctgcatagttcccgaatgccccgttctcagcgatatccattccaatgcccgtccagccggtatggtcatccgcttccggcttctcatcttttcggaaaagaatccgcaagtcaaccgtttcaccgtcaatttccaaaggctcctcccggatgatggcgaacacattcataaaaaacagataagcatgaaggcagagcagaattggcggttccgcaccttcccttcccgtataaagagcttttccgaactcccgtaatatcatgtccctgtcgccgccaccctcatcacccatccgtcttaccagtgccatgcacttgcagaaggtgtcaaacgataccccgttgagcatgtcttccggtccgtgaaagccgttccattccggaaggaggttgattccggtactcaggtccagccggaaagattttccctcacgaataacgaacggatccgtcagggacaacagtgccagcgtttccttccatgtggatggaggaagatgccccatatcaactgggagtgccagaaaaagagacagaattttcaaacgtatcccgggttccgacaatatatgctggttagccatggtggcgatctccagataacggtaatactgggcaggtgtcagttcctcaagcgtttccggcacactcacttgtctgttctgataatatattacacgcataaaaatcaaaaggttatccccttgctttgaagcgtggggcctgaaacatagaaatcaacctcctcaggcgcggcgtccaaagccgccaccgtatcctgcaattcctgaagataccggtcggcatcggcctgaagactgtccgccacacttttccgcgcctctttctctgcccgtaacttttcctttacagttccggtctgctgcacctgtacgataccttccggaataacctctacaggcaggcgatcaaccgctttcttgatggccaacagtgccagaggtcgctggcattcctccaaaagagtgtcacatacgttcggatcccttctgacaagccaatcaaaccgctcttttccgacaacaggcagaatgtctgtacgctgtatttcacgcaggatgggaaccagtatgagaaatagacggtggctgccgatatgatagaactcgtcaaactcgtccttggtacggatgagcaatccgtccatctgtcttttagccaggcttttttcccagaagtcaaactgcttctcctccaagaatcctaccagagcatccaccgactcatacgccagattaagtatgttcatttcatccttatattcctgaagggcagtcagccccttctcattctctcccagtttcctctgccttccgctaccgccatgctgtgcatccaacgtgggaacaacctttacccatgcgaaatatgccacggcacgctgcgccatgaatacaagttcctctttctctggatccaggtcttcatcccaataaagggcgactatcgccgaaagcacgtccgccccgataatacaggtcagctggcgtgcggccaaaggcagtaccggcttccacttggaatagtccaggctgtcggaaatcattcccagcgccgcaacaagctcctggcgcccttctccgtttctgtcgaatatcattttcataacttatatattttctttcatacggtttcccggcgacacgttctcttcctgactcaccacatgcctgtacagtccgatacgtatatctgttcccggccagttagcattgatatactcctgcaccggcttgcagagtatcatgtccggaatagccgtttcagacgcattgtagaccttgatggaatacagtttctcgcttccactgctcagtttgttttccaaaatgaggttcgccagcaccggatcaattccgaacccggaggtggcagcagcgtcagccttgttgctgattctgatctgtgcctcgatgtaatccttcaccttcttatcaataggagtcaccttccatccctcaaaatcgttggcttcatcgctccagaaccgggtggtgtgcatatattttcccacattcttcatcccggtaatacctccggcaaatttctccatgcattcatccttgtaatcctccagcatcttggccgtataggtttccccacgcttgcggcatacggatttcaaacgttcctccaccttgtcccaatacccttgtggagattctatatgcagactgagcgcactggaattcagattatagttatgcagtaatggtgccaaggtaccggctatttccagccagtcaaaggctcccagaaaacgcggggtactaacaaaatccttacagaaggaatagatgttgtaatatctggccgacaccggatatcggaaaggctctgccggatcaaacatgggatacctctccatatattcaggatccgggaaagggaaatctcccacgacaatgccttccggatcatttttcccagggggagggtacaacagtctggcacgctggtaagggatatgctccaaccttagtagcttcccccgcccgccaatacggggcgcacggttgcggacaaacttgataaagaagccctgcatgtgggtgagatcaaccagacaacggtgcatacaaatccgataatcccaggaagacatgtccgactcaatatcaggtgcaagcacccattttttgtagaaacggttgtccgtatcatcaattgcatcctcatagaaccggggaccgtccccccattgcagaccggcaatcttgccaagaatgccctcgccggcatagaaccggtcaagcaggcgcatgacctctccgggcatgtcattgttatcccccatcggaacgatatcatatccggccacactcattttcctcgtgaaacaggtgttacggttatggttcagcatgatactggaaggttcccatcccttaccacgtcctgaaatgtcaaaggaataaagcgatccattgccggggtccacaaagccgaaatttccgctacgtcttacctccatattacaaaactgttttctgtccgttaaattccactaccagaatctgccagcagttcaatgcgttgcctgtttccgtatcgacaagaaacagtttatgactggcattctctattttttcatcagaagccttggaacgaagcctggccgctttcaaaaacaccagatcaccgccagactgtttctgacggttgtatttccggaatttgatactgaatgtcccttcagctttgctcaccgctttcatctcctcgactgcggtatataaattaatttgtcccatattcgctatttttcaagcaaatatgggacaaatgcaatatgggataaaggacaggactacttgctttgtggatgcaatttctctatcagtcctgcatagaaccgaaagaattgcaccaaatccagatttcttttcaaattgtccggttccatcaactcaaagtcatccaacagaatatccgtcaatttctccgtatgctcccgaaaggaaccgggctcatgatcctgtatattagccagcgcatctatcacttgatctgttatgacagcattcgggttaaatccttcttctttcatttcaggcctctttccaatattttagggtttgtagattcacagaaacggaactcgccgcgtactggataaatatgaactatgaagacagtattatacggattcttatcgggatagacctcaatatgtatatcattgtttctggaaacatccacacgaagcggtttggttcttggaaactcttcatccaacatggacgctttggcacgaatactctcaataaaggcatcacgtgacagttcatcaggaatcaatacatgagtgaaagtggaaatccactggttcatagccctgcctttattgttgacagacaggtaagttttgggctcatcaataaagaatttcatttcagccctcctttcttgcaaagatgtaacgacacaacaaaccaagccaggcaaagcaatgcaggaacagccgacacaaaaccggcacataccaatgcagaaaaagccaaggaagcatgagccataaggcacacctgacggttggtaactacggattcaagaacacacgagaacagttgattctccttttcacaccacacactgaacgtggatttttttgcctctaatacaggcaaagtagctgtttgatttttcattttggaagtcatttaaaatgaaacaatatgttgattattacgggaagggaacaaaaaaagttccgctccccgttgacttccaccttgaacaggcagtgggcgcattaacgctccacacgggacggaactatatgataatccatgggcataaaaaatgccaacggctatgttggcggtactgtccgcctgttcaaaatggaagtcattgcaaagatggggattattttttaatccacaaactttttggtaactttttggagaataaatacctaaatagttgaataaaaacttgtttcattgaaaagtatatcattattttacgatctacttttaaaacatcaatattatggtatcattaactagaacatttcaccccataggatttggagcattctatactgaatgtcataaaacaattgataaagaaataaatatagtatatgattgtggaacaataacaaaagatgtaaatttaaaaaactatatagaaaatctctatgcaaaagatagcactattgatattctatttatttcccatttccatgctgaccacataaatggtataccttaccttaaagaacgttgtaaaataaaaaaagttattataccatatatacctgaaatagacagacttttattcgtttatatcaacaaactaaatgatttttctcaactaattattaacactgaagaatatttcggaaaagagactgaagttattagaatcaaaccggaacaagaagatgaattaaacaatagctttcaaagtgattctgtcaaccatgaaaaaaaaaataccaatattccaagtggtacccctattaatataccattaacaacatctcacacaaattcacaatggtactttatcccattcaattttgattatacaaaaaatataacaaatttaaaaacaatactacaatgcaatggcctagaatataataatttaaatgaagagaattacattatagacaattttcagactatatctaaaacgtatcgcgatacgttaaaaagtaatacaaacgactcatctataattcttttttctggtacgacatataacacgaaaccatcattattctttatatcttattggaaaaataaaattaaaaatggaaacgttgatatgttaaaaagatactattgcttatcacttcctaactgtatttactttggggacgtttccttaaattccaaacgtatctcttgtttaaaatctaaattaaacaaaatcgatcaaactttttggaaaacaatccaaacaattcaaataccacatcatggttctaaaaacaactttaattctgctatattaactccctatttgacatgtatcatttcatgtgatttcatccatttcaaatctccatcgtgttctgttatacatgatattttaaaatcaggttctttgctaaaggttgtaacacatcagaaacacacccaatttaccgaacatgcagtttattaaaaaaacggccgccgtttcccgagttcgctaaaacaatcaatccgtagtcactccgtagagcaattaagttgatgggaaaggcagccgtaacttttgcacaacaagttgtgacttctacaatctcctatatatcattttgctgacatcagcaaaatggatctgtatgggtataaaaaaagcccattaaactatcatgagcattaaccgcgctctacgttcctgaccaacaggattgaattgttttagcactgcaaatatgagaattatttttttatccacaaactttttgggattttttttgaaggcggagcactgccagtgccatgaaggtaagagaagcatgagccataaggcacatctgacggttagtaaactttcttccgaaatggaaattctctgatttcagtcatatagctgacctctccactgctcttacggataacgataaataattaagtgattaagaaacaaccacaaaaaagccccgaacttaaatagtacgaggcataaaattttaaatgtcattcatttataggtacataaaatgtcgtttttgacggagtatagataccacaagtaataacctccaaaaaaccatttaaaaaagtatggtggtttttgattgcatacttctgacgatccccaacatattgcttgatatctttcttgtttgatgctggtgatatcaacccgaaaagaaaatgattgtttgtctttgagttcaaaactcttttaggttcgtcaacctccatgccacctacatacaattgagaactataacatgaagacaacaataaagataatgtgctaactaatactaaaagcattacttttttcatgattttgttttttacgagattattatttaattggaacagcaaatgtaatgataatatccaacaaccaggcatttactaatggatttttttactagttttgtaacaacttaaaaagtaaccatccatggaacgattaaatgacgaacaactaaatgtactggataaagaaattctggagttctactgtcaagaagcagcaaaacgtttggaagactatatacgggtggaatcgaccataacagagcgctgttatatcctgttcggcatctattatgccattattgctgcctctatgggatacgtactctcaaacttagacaaacaaaatgatcttcctgtcacgtatggatgccttgccttattcacattctctttcatatccttgatatatgtcacaaaagccatgaagccacacgatttctatgctaaaggaagagatccggaagaattcagaataccggaatatgtaaaatatttccaaaaatgtccgaaagcggataagaaaaagaatgtattggcagatgagctggtcatgcttcaagagagcatcagcaaacaacgtgcattaaatgagaaaagagccgggcagataagcgcatcactttctttcctcgctaccggctcctgtataactgcgatccttttcattatcacttatattattttgtggtaagaggaatctggtctgctccagtggatgtctttactaccggaataggaggaggagctggcttatttggtttacttttgcccataatataaaatggcgaatcctcatccaatgcgtgccgaccggtgataaatccggaacccgattctacaggttacacatcgaatgaggagtcatttttacaaaaatgttttttatcaagattcggcatcgcaaatatagggataatattcaacatcccgaatttcctagcggatttttattacctttgctgatgcatcaaaaatatgaaccatgacaaaagaacaggaagatatcaagcagttacaaaaagaggtaagccttatttgtatgcacctttatcagatcaaaaagctgataataaacagtctaatattccttttgcttggcctgataacaggacttctgttataaatgcacatcctgttcacagatttcaatatcaggcagccaaatccgaaacatcttttttaccttgtttacacagcattatatcagtataacagctactgtaattcacacaggcattgaattccactttcacacaatccttaaaaggattaccgattgagggattatccccaatccaactgcataattcaagaatggaagatttattggatgtaaaatacacaaacgaatgctccttcagaacatgcaggacattcagataatcagccagatgccagtacattttatatgttccgacttctgtacttaaataagggggatcaaccaggaaaaccacccccggaacatccttgtaacgtttgaacacttccttataatcctcactgacaatggttagcccttccagataatccttcgcatcggaatagtcagtccggtggatagtgttataaaacgtttctttcctcatattatccagattcagcacatatttcatggaaaacaacagggatgacgacaatgtgatataatcaacgtagccatgttccttttcctccttttcaatacgagccaatattctttcacgggcttcaccggttatacgtttttttctggggagttccgctgttatccttcgcaaatctgccagcaactgattggtattcggtatattgtcaagccgttgccggtagttgtcgaaatcattatataccacaacagcatcaggtcttacccgtttggtaatgtgggacagcagccccgatccgccaaaaagatccacaaaaacggtactgtctgggaatcggtccaatactttgatgaattctttggcaaacatacgtttctgccccacaaacggaagcggggcagacagatacatatttctcatgttactttccatttaaaaaaaacgccgcaaagatcttctgaatttatgagaaacaggcaggatcaggagcgttacccactgcacgacacatgcagcagatcagacattcagttcgaaacggacagtctcgtcaccggcaagcagtgcacgggtacctgggatattgttctcgtaaatatgtacatttcccaggtagagggtgatcgacttcaggggaagttctatctgccgtgccatcaggtacagatgataaatgtcagcaggcaatccgagatttgcatcactgctgcgctggtatgcggacaacaccagttctccattgtcaatctgaaactgcaccaagctcaggcagggcgtctggttgctttccacaccggtctcacctaggaaaagcacataattcttactgttacgtttctccctgttgattttgtctatgagtggcggcagcttctcaaaataggtgggataagagttcacaagaatggatccgcaataatcccaccagttgatacctgcttcgcggtatttttccacctggcgctcaccctgcataaacaaatgcagttcattacgaagcttcttgcgggcaatatgatgcccttcaaagatgtccaacagatccgctggtgtaagtaccagaacctcattcagaaggtactgtatgttccccttcctgtttgattgcgtttttcctgtggcaagtatcttgtccagcacctgataatacttgttcatagccattcctccttataaaaatgaaacatcctaaagataggagaaacagcacagtccgcctgataaaacggtccgctcatactgcaaacgtcttacagtcactccgaaaccgcttaatcagggcataaatcgttctctcactgaccgaatatttttcagaaagcacggcaacgacataggatactttctccccttgacttgtccggtacatgtattccgaatacaaatccacatattggacatcctccagacggacacccgcctcctgcaactttttcagcagctcgcgattaaagtttattatctctatcactttcatacaataatatttgattatctttgcgccatctcactcacataacatacaaaatgcggaaagtcgcagtagagggtattccccccggctgtgcgactttccgcatctttgtgtaagtatgtgggtgagataactacttacaggccgggggttctttttcgccttcccccgcaaggcatttcacaagatccagtgaaaaaccagccaaaaaatgactgattttccccttattttcgtatttatcattcaaaatgtgcgtatttcagccttgaattttgctgtaagagcacataaatatctagttttcaataaataataccataaaaccaaaatctttaaaaccacgtctcttgtttccgtgcgggccgctcagaagtcccagggcaattgccccgggcaattttcgtgaaatatgacagagaaaaacggcgggatgcctggtacggacagaaatcactcctcaaaaccgggaatatagggatttgcattattgccacgggcaatacggacaatgcgacgccagtttctgcgcatcatcaggtatttgaaagcgtcactgaaattggtagaaaacatgggaagtttcttcggggcaagcttttcactcttcttgatcttgaacaccaccttggtttcacccttatagcggatgccggctggggctttctcaacactgctgaccatttcacggcaattcaccgcatcaaccagcaatcggggcaattgcccattctctcccttcatcaactcctgcatgaatccgtattcctccgactgggggatgatactctgtctgcggctcatcagaatgacggtccatccggtccgccggccatcggcatccttctctatggcatcctttatcttcctggcataatcctccccctgtctttcaaaattattgccggcccggtcataatacaacgacagttccttacattcatgtgaagcaaagaaatccaagaactggtcagccagctcacggaaccatccgggaggtatctcgaaaaagtttttgtggcatcggtaatacgctccgtcttcctgcccaatcacgaatgaaagcatgttgccgaagtccatgccgccatccaaaggctcgtcatgccgcagatagcgcaactcccgactattttccgccggctcccctccaggactcccgtcataatacttatgcctttgcccgaataatacatagaaacggacatcacgccggagaccgggccgcatacccagcaccgacttgcagaactcatgcagttcaagagtaccttgatataagtttcgtatatattccgaggtcaggatatcaacattgaccagggaggatgcgttaagaaaaaaggtttgtccgcggcgcaatttgcgcaaggcccgatcataataatctattttcctttccagacgcgccagcacggagtgactgggattgtctttcttctgctcgcgcagttgcttcaacagcagcccgttccgttcaaaagccgcctgtacaatcagaattatacggtctggatccatattgggtgcataacggaaataccagtcatattccccctcgttgacatccggcatatcagtggtgatcgtcagaccaagaaacagatgcgatgccccgtaagtgagagaatcgccacgtagaacaggcatggcacggttcaccttctcgtccttgtcatattttgactcgtcataaaacagatggaccaccgatttgccggcaagcagtgaagggttatccagcgaacccataaaaataacactgccattccagaaggaatagcagttccggtaatcattgacaattatggagcatttcgccttccaggaggctggcggttcctttccacggatataatgcaccccctcgtacagccccatcatttcccatcccttctgtacggcgggcatgatgttgtccttcagattggcataagtgttggcgacaaaagcgaaaggcgcaccgggcatttcccagatacacctgtatgaacgtctggactgtatgaccgtactcttggacataccacgcccggctatgacaaccagaatggtcgtatccacgaaatcggtcagcatctggacattatggctgaattttacatccacatcctcatcattcgctatcttcctcgctaaattcctcgatatcataaatcatacgttttttcaaatcaaactttcttattcgtgcgtcctctttcagattatcacgcacagcaacaggtatctccggtatcgagtcgatgaaaccctccagttcctttctatcaatggcgggaacgcccagatcctcacggctggccgtatagatatcaacctttttctggtttagaagctcttccggtatctccgcctgttccttcctgaagcatctgcggtattcaccggcaagtttcaacaaggcccttgcctccttgatcttgccggccaggaaagcggcgtccgcccacttctcggcacgctcggcatacagggcagcaaacgcctccggacggatgttgtcttgggtatagaaaaaattgatgctgtcattatacacctgccgggccatccagtcggacaggctgtacggctccgacttcagcagcctgattattcctgcctttgtcaccatcctgccgttagtgaaacgcatcctggcacgcagaccacgtaccatctccattagagagaaatactccctctcttccggacgcaaagaatccagcgttccggtggaaagaatgcgctggatctgattcagatcaaccttttcaaagtccactcttgaaggtctgaccggcaattcactcatattcatccatatcttttaacagattctcaaacaaacggcgttcctggatctccgttagcagcttaacggcatcaatattcccgtcctcagctgtttcgtgcagctttatctcgggagcggcccgtgagacaagcacgccttcacggatcagccctcgaatggtggttcctggaataccggcgtcatatacaaaaagaaagcattcagaagcgtcaaggccaagataggcggcaatatcctccggcgcataacctaaagcggccatgcggcgaacatcatttttttgctctccagttagagccaggctgtcagggggaatatcattcataagataatttgttcaaacattcttctaggtacgccaactcgcatttttttgcagacagtaaatgggcaaactcgccacggtcacaagggtgggagaaacgctccattttcaggagtagctcattgatcccgtcctccagcgtccccttccgaaatatcagtttttttttctgttttccagttccttctcggcggccgatttcatagattcccatttatccactgccgccaatgccttcgcacgttcctcctcaccttcaacggtttcaagcttcttcttccatttggacacgttgctggccgcattcttacggatattcatcacctcaagatcacttttgttggaaagctcgtcagaagctagagagacggcaatacggggatgtttcccgagcagcacatgattgtcacggtaatattccaactcctcccagatactccggtcctccaggtaattctccacagttgttttggctatggcaaacgcctgttccagctcaacgtcatccggcagttcccccagttccctgaaagtttttagataaaggtcataggccgtgaacatatcggcaaccagtattttcagtacatccggacaatccggagagttgaggaaggggaaacggtcacggaaacggatcacattttccacaaccggggtgacaggaacattcactgcggtttcctcagccttgatctctcccaccactatagaagctgaagatatgtggggagagtccaccgccttccgttgcattgtcctgaaagccgtttccgaaattccggcaagcttgcgcagttcctccatcaaggtggcacgaagcaggtccgtttcggtattccgccggaaagtggctttcagcatcagattaagcccgtactcctcgtacaaagcaatcccctcacgatacggacggggaccgctcagataagcaataattttttctttcatacgataaaatttacaatgtaccatacaaagaaaaagcccggcaattgccgggcaaaagacaggcatgaataaaaaatccatgcaacggttcaattgcatggattggtgtcgaataaaaacagctttcaataagaaagtctgagtgaacctattttttgagaaatgtctttcagcgcatgattgaatctgtccagctcctcggcagtgaatcggcagggcttcccattgaccacattaccattaatacgctgatatagccattctttcgttttgccaaagtaatgtttcgcaatgaaagacaacgatatgatctcggatatgttctgaagctgtaattttatggttctctcctccatgccagcaatttcaccactaatcccattcaagcactcatccatgaaatctgcaatcatctttttgtccccttcactcgtataagtatcagctatatgtttcacccgggaataaaactccccggactctgttcccattaacggacgtagagcgtccaattcctctttcagtgtcatgatctctttatttttttaagttccccataggctggggaacactgttattactcattttccatctctttaagaattttctctatcaggttcagacggtcaagaagggcgtttatctcttcagttctcctgatcccggtctgttcctcaataaaaaccaattgtttcaatttcatttttacaacccccaattgcattgtgaggtcctttttaatttgttccttactcattatatgctgtttttaatcgacattcaaaaataataatcttttgcttattatacaaggatctctcaaataatcttttgcttattaatcatttttagcaaaattccgcatgaaataaaaaaagcgaagccgaagccccgctttcctgaaataatgaaaccactaaaataagaatatgacttatgcctgataacggctctgctcaatccatgtacatgtaccggatccggattcaaaagcctgaagggttatctggctgcccggactagcggtgaaggtttctccgccacgcagcaggaactggccgccgtgagcaattgtcggagccacgcctgacgctacacccagcagggtcatcactgcaccatgccgtccgccggtcactttatttatttccgcttcaccaccctgaagctgatattgcccttccgccgtaaacgggatggtagtggcagacgcgctcacactagccaccggttcttccgaaggaacagtacccttataaatggcgatgtcatcccctttactgatctgggtaaaagtgaattcagaggagttggcatccttgttaccggtataattgactcccatctgcatgggattgcagggagaaccgaacagatccttgtcctgaccgtcacagtagctcattatcacgatacatttccgaccgagccagttggtcttgaactcacggaccgcctgcttgtttcccggatggttccccttgaccgtaggggtgaaaccaagtgcgtcaggatctccgtctgtattgcttgtaacctccacggtaccgggagtgaaatagatgtcggtagaataacatccaggcttcaattgtatgttctcggtcatcaacacaccggccgagtcacgtgccgggaacaccagaatatcatccacatcaatgatactcatcatgtcgcgcgggttgattcctttacccggattaccttccgggcgcttcactgctcttttaacgtatgccataattataacaatttaaaatgaataacaggggcggattactccgcccgtaaatttaaccacgtgccacctcatagaatttgccacctgcataagtcagcatgataaatttgccggcgctgagcgtcatggcatcagtcaggacaaaattaccactattagcgatagtggacgcattcgtattcccggccccgtgaatggtatacacctcaccttccaccgcatctgtgaaattcgtgatggccgtcgcttgggtattggttcccgttacgaacaccgtggcacccgccaaagatggagtggttgcatcgttggcgaactgtaatgcaccggaagctgccgtatcacgtccgatttcgataaatttcccgtcagaacgtttcatcagacgtatggtgtcccctttcttcggtatccagtcggcactgatcaagctgaacttatcggatttggtgatctttacccccttgtcctcgctgccacacttgatggtgacaatcttacccacttcggcgttctcaatatccgtaatggtgaacaggctggtgttggccacggtctgtacactggtatgcagggctacgttcgggtttttgtccttctccccgtcaatgaaggaagatgcaggccggtcatactcgttacagaagatcatctggcggctgccgtccatatcctcttttttcgtatatttgaaacctaccgcacgcgcccagatggattccttccacaaggaccataccttaagcgtccagtcttgttgttccaagctgaaatttgtcatttcaccggccacatgctcgaagcatttgatattgccctccatcgtccagaaaatacgctggtgattgtctgcgttcggaatcggaatcagcttcacagccggatattccttaacgtacatcatattggccttgtaatcctggttcacaccatagtgcagctcgttgtacttgtgataccatactaccatatagctgggaagatacagggccagctgcccgctgtcacggtacacggcaggaatcattcccgtaccctggaacagtttctcaccgatattggcttccgtgatctcacccagcacaaacggcttgatctggtaaacggtcttcccgttattaatgtcaatgaaaccgtcaaccttctttctcagccattcatacagcccgtcggccgcttccatggcgcgtcccggcttgttaaggtcaggatccttgcgcacgccattgatacggcgtagctcacgctcgttatgcagcttcttggctgtttccgccagaatgtattcaatgaatgaccatttgatcgcctgtgatccttccttgttgagagagccgatccaggtcttttccagctgcttcaggtcacggaacttatgggcgaacatgacactgaacatacgcaatgtctcgttgtcgaactcatattcacctttggtcacattgtcgaaatcactggaggtgttgtcagcctgcgagaactcacccagccaaatgttgaccagagtggccagatcctgatatccgctctccaccgggaagatgctctcgatactggggagcttggtcaggaatgactgcaaacggtcctgccagcggatgcggtagaacgcaccaaggtcctccttcagacggccgtaatccacggaactttctgcacggacctgaatattgattccctgacttgcgagcagagcggcacgggcacgcatgttatacggacgatccagcgcgaacatctcaccctgcatacctccaagctgcttgtcatcatccaggttgaaggcaccggcacccgtattttgtttcagaccggcacccgcaccatggtccggctccggcaatgcgctcagtaccgaaatcttctgcttcagctccgctatttcggtatctttccgggtgatggcctgcgtcttttccccgtctgtctttcttattgcatccaactgctcctgcaaggaagccatttcggatactttctgcgccagcagaccacgaatcagcgcctctcccgagttctcaacaggaccggcctgctgttcctcatccttaaaaccatttttcaacgcttccccgaaaggagttatgaacttctcatcgaagccaagttctttcagcttggctacatcatcggcatcgaggatatccttgtcctcagccttcttccactctttcagccccagcaatccaaggattgcgccggcaaaggtggacattttagaatactttcccataaaaataaaaatttaaaagatttgatttgtcttgttgatgacggactgcgccagaatccagcgcgcagctccctccaaagtgttataaccgtccgccagtccttccctgaccgcttcatcacccataaaggtcgccccgcggaacacgggggagtccttgtcataagcgatggaaaggttctccgaaacggtccggcagaacatcatgtgcagttttgacagcttttccttataaggttcctcgttattgttttccgcaatctcccggtgttccctgtttttcaagtcggccgaatccgggtaaatctcccgataatcgattccttcttttttcaaggcctccttggcattataataggtacccacaacaccgatactacccacctcgcacatcaacgagccaagaaagcgcttgtctgcggctgatgccagccaaaaatgtgcggaagcacaagctccggcaatgtaagcgactacgggtttgggacattcggatatcatttttgacgcattgtccagaccggtaatcattccccccggtccatttatccacaaaatgatgcctgcaatacggtcattagctgccgcctgtgcaatatattcctgaaggcggaacgtctcccaggaatagagcgtcccttccagcacaataacggcaaccgaatcggaaggaagaccgctgtcttccaaattccatcgccccacaaaattcagatccgatgcgtatgcggtcacggtatctttttcaaaaaatgcctctacctccttaaaattgccggaatgtattgaaggaaggatcagtgagaccagattgtaataatcctctctagccatggcccatttttcattgaatattaactgaatacgattcatccgttcttttttcctgcaaaataaagaacagatccatccatgaacaaggacacggagaagcggtcatcacacccggtcatgaaaagaccgtttttccacataaaaacacctccaaaaaggacatggaaaggacaaaaagacacgctacgttacataaaccttaattccgcaacactattacaaatataactttttaagtacctgagcaacaaaaagttgctcaggaatttgccatgtcagatttttcacctatcttagtgttgcaaatcaaaatatgtatcaaacccgacagacatggcaaaggtagcaattaaatccgagaaactcactccttttggaggaatattttcaataatggagcaatttgactccagactctcatctgtaatcgactcaaccctcggtatgagatgcaggctgtatggttatcaatacagcgaaatcatccgttcgcttatgagcgtttatttttgtggcggctcatgcatcgaggatgtcaccactcatctgatgtaccacctttcgcttcatccgacacttcgcacatgcagtgccgacacgattcttagagccataaaggaactgacccaggataacatttcctacacatccgacactggcaagacctacgacttcaacacggcagacaagctgaatacactgctcctcaattgcctattgtccacagggcagctgaaagagggcgaggggtatgacgttgacttcgaccaccagttcatagaggctgagaagtttgatgcgaagcctacatacaagaagttccttggttatcgccctggcgtggcggttattggcaacttgattgtcggcattgagaacagcgacggcaacacaaatgtccgtttccaccagaaggacacgctgaagaggttctttgaaaggtttgaacaaaacaagcttattatcaaccgtttcagagctgattgcggctcgtgttctgaagagatagtggaagagattgctaaacactgcaagaccttctatatccgtgctaaccgatgcagttcgctctacaatgacatctttgccctcagaggttggaagaaagtggaattgggcggcattgagtttgagctggcctccattctcatcgagaaatggaaagggaaggcataccgtcttgtgattcaaagacagaagcggatagacggcgaactcgacctgtgggaaggagaatacacctaccgctgcatccttacaaatgactacgagtcttccgagaaagagattgtcgaattctataacctccgtggagggaaggaacgcatcttcgatgatatgaataacggattcggctggaacaggcttccaaaatcctttatgggagaaaacacggtgtttcttctgcttatggcactcatacgcaacttctataaattcatcatggcgaggcttgacgtgaagaggttcggactcaaagcaacaagccgcatcaagacgtttgtctttaagttcatctctgtgccagccaaatgggtcaggacatcaaggaagtatgtgctgaatatctattcatgcaacaatgcttatgccaatgtgttccagaatgactttggataacaccgacaacttatagtcgtgattttgcgtattgcctcaagtcgcatggtggggtaaggggcatttatatgtctttatggtgacattcgatgcactgtgccccctttttactaacgatgcagattcttttcgcttctgtatcatattaggcgcgtagttgcggatttgaggataaaattatctgtgtttatattcccgaacggaggttttacggcgcatcttccgccgccagcgctggtaatctttcagaagtgcttccacgctcagactctcaatgcaatacttccggagaaagtaccaggccgaattgatgtagtctataccatagacatgtttgttttcatcaaacaggtcatgaagctccgcacgcatcattgtgtttatcttcctggaaagtattttggctcccctctcgcctatataattataggtagccaaaggtttgccacccggaaggtgtgcctctcggcgctccggcaacacaagctccagatttccgctatccacagggcatccggcaggacgtttctgcaaaagatcatagacgaaatggtacaaatcaagatctgaaggcaggcggactaccttgctgtccggggttccatacttgcctattagatattcggctaaataattttctatcgttatcttcgtggtaatcatatacttatgtgtttatacaaaagtaatgatttaaattgagatagtcaaagaacaaccggctaaagatggaccggcttccaaaagaatcatgaaggccgttgcaacaccccttgaaaaacaaaggggggattttcgtgcaaccgtacgatctgatgattaacattattgtaatatattgaatatcaatatattgtatactgcacaattcgcgcacgattttcgtacgaaatgtaaaaccacgcacaaaaagccataaaatacgtttttggacaaatcgaacggaatcgtgcaaaaatcgtgcagacataaatatttatatatcaatatattataatcaaaaaaaacgcagttgcacgattgcacgaaaatttcttcattttttataagggtatatttcttaaaagttaaaaaataaaaaaaagaatatataggccgcccgttttcgaacagatcgcacgattgtccaaaatgttttttctggggaaaaaggggtatgaggggaaacaaaaaagtccggaaaaccggacttttaaactatatgtcttcaggataaaatgcctgcgttatgaattcgtattcccgggggagcgaccgcacgcccacaataacacacaagcctctggcagccatttcatagagcctctggttggtcacaggggagttcctgaagttatactgggcgcacatcacgaaataagccgtggacaggtcacaggaataaagatcctcctgtatcagcttggccgcatcactaggtatcagggcaaagcccagcctgaccgcaagccttgaaatcatctgtctgcgtgtccggacatcaggacataccgccacaaaaattttattctcttttttcagcatattgcttcctttttatttgcatatctcactaaaaatcactaactttacaatgatataaattgggatatatcatacatttctatccgagtagaaatgcctgtaagggaccgcaggccgccaggccggacaacgccggatctcactcctgtcatcagaaaactccagcaatgcgtcattaatgctcttgtggaacagctcctctatgatacacatttcggccacatccatgaatagttccaaagagcgggctgtgcagtgctcggatacaatgatggatcctccctcgggaatccggagcaataactccgtcacccggtcataaaaccttttgaaacggcccggatcacgcccggccagaggcattaccttttccaatatttcctgataacttcgtgccatgtcagtagtccagtctcaaatttcccggaagatcaggatccaagggatcttctcccggttgtatgatctccttgccggtaccgaccgtgaaatactccactccgccggacttgtcatccacgacaggacgtccgtccttatcgacctgataggggagtccggtcttgctgtcatatttctgggggttaaacacaaaacctttccatttgcaatacatgacgaattttttcttgaatgaggcaggggtattatatttccgctgggccggatcatacaagcacaaggcgtcgaacagctccttcttcaccaggcggcaaccgatatgctccggtgcagagaaatactcgtcagcccaggaaatgaaggtttccccgatctcctgccgcagtttgcgctcctcaagccgttctccaggagcttggaccacaccgaacgtcagatacagttggatacagttggccagcaggttccagcacaggttccactggtcaaaatcccactcggtaaagaacaacgctccgaaatcgtcaaccggtttgtggctttcattataaaaatcggaaaaggccaacagccactggcgatccgtgaaagaggagccggttccgcggatggcatggttcgtggcaatatagattttgggagactgcgagaacgacagcgtgatacgccgccctcccttatagttaacactccaatccccggtaatgtttggaaacagaaactcgaagttgaagttctgaagcacatcatcaataaacaccagcttggttttctccatcacgtcattccatacaaactggtctttgaagatgtcggagttctttccgggaatataggctataggcatgacgttcctcatgagttcccctataagggattttccggaacgcccgtttgactcgccgacctccgactgctttccatccataccgatcaccgcacgcgccacattggaatccttcgcttccatcagcatgtacccgatggcgcacagtttggaaagcagatggatatggttctcgttctcctcctcgggagtcacctcgccgcttttcttcctccatgtgaaattgctggcattgatcaggaattgcagataatggcagcggtgtccgtcttcggtcagctcataggaatacgtatcagcgtccttcctgaaggtgacaagctgttttcccagatatttggccggatagtcacgtctctgctcctcccagatatgatgtgagatattttcatagcccatttcctttacgctgtcacgggtgaccagccagcacgatttatcgaaatagaaatactggccgtcccgggaaggcttaatgaaatcgggctgtatgtactccagcagtgatagcttgtccggtcccacatactgcgacacccccttgatcagcatctcgttcactcccacgcagcaattatgcttggcgaactggaacaggtaatcccggacgtcgctcgcctccaaggacctaaccaaaggaggttccagatggatgaacaagaaactcttgtcctgtcttctcaggcgcccaaaaccacggttctgtaaaaagttctgggaattcacgtaacaaaactcataatccgatctttcgttatctttcccctcattcctcttgaccacacgccagaactgttcgtccgcgtcaaagggctgagccgatacgaccttgccatcctcatcgaatttccagcggtaacggttgaaaaggaattccggaagattcttcagcagatccttgtggcgctctgcaaacgcctcatgggagtgaagacaccaaagctccatcagcctgtggtcagtgaaaccggtaattttaaacatctctacatactggccggaacccttcttatcattacaggcataatcaaaatccgcggccagctcgtcctcttttcccaaaagagtattggccagcaggtcatcaagccccttgtcccctgcatcatttttgcggatatgccctacaaatatttccagatagatgtcacggttcttcagactacgcatatactccttgaaattcctagcagcggaataaaagttcctgggacgtttctcaaccggatcgtttatcttgatattacttgagatatcatcccagtccgaatcaaaaacaaatgccacctccctgacctggcaaccggtgacaatcctgacgaaatcctccggtagcgagccattatttcccagattctgtatccctgacacggcaatggacgggatgccatgcttgcacgccttctccgctttcttctcgccttcctggatatacaggcggtctatcctcgtaccgctcttgaaggcggtgcgtatcttttccggaatatatataggagtaccggacccccgcggtgatttgtatttgaaaggcttcccatccttgtccaaatgcatttctgggaactgccaacgaatgcggtagtattccttcatctccccggccgccctgcgcttgttatccttctggacataacggacaggaaggccgtccagatcataatattctatgatgacatcatcccccttggccgtcagcattccccgctcatcaatcgttcccggtttgaaagtacggcattggaacacggatttcgtatcatcggtcttgtacacactggcggtcacatcctcgaaagtcagtcccgaggcggccagcattcgggcgcaataagaacccgtatccagccctttggcagccttgcttcccttcttcatcttctgaaccggtttccaagccggtttgtccggatgggggtccagcagcacacagaacttcttggcaaggtattccaacgcatctgtataaccgtatccttcgatattcatcagatacgacacggcaccctctccgccaatctggcaggagaagcacttgaacagattcttgccggggctgaccgtgaatttcttcgcgcttctgcacttggggcattcgcaaacataatccttgccggattttctcagttcccggaaatcctgcacaacgtcaagcaacctgccgtccgacgctgattttatccttaatatttcgttttcattaaaatacataacaaataattatataaataagccgcaacttcataagacaacacaaaattaccggattgcagcaacccggaatggaccggaaatgatgatgttcccggaacactttgcacctttcaattcattgacatcttgtcccggttcactgttttagtcctttcgtactccagcagagcggacgtcaccgccttccgaaagttctcattcacagctattgcaccataaagcagcctatgtagtcttgcccccttacaactggaaacatgtccggcaaatatctcataaccctccccagtatcctcttctgacattattgtacaggaaacatgtaaaccggtctccttactttgttccagtataaaggagagaaaagcctttatttcagtttgtttattcttggaattcataatcttatatttactcataattttcttattttaaaatttcatcaatagatgataaaacactctccagtctttccaactgctcagagtatttcataagaagattttcttctctttccgtagcctcccctccattgtgaatatcattatacttttcgtattttgattttacactcttatatgctttctgaaagaacggaagcaatatcttacattcctctttggtcatacagaccgttatctcgtatggagatgaatacgattttcttgtgctatctatgtaactcatatctgttccgttttgagggttattttatcacatctgttaatcggtgtttttacttctttcccataccacgaacaccaataatatggctgaaataaattgggtgaatgcgtgcaatatttacatctttcacacaggtggattccattcatttttaaattttttgagtattaatttttttcaatgaaagtattggttgtattcaacactccggctgaatcttgacttttgccatctcttatgaagattccttcttctttcagcctttcataatcgattttattcataagaataacactcgcattgccatctatatacagtttgcattgcatgaattgagttccttttacttcctcaattgcgtctatttgcattgttctttttttactcatatctaattcattttgaattattttttataactaccgccattgtactaatagaagtgccactctctttaaactcgcctgcgctgatttcaaacacttctccatgtacttctttcagccagttgcggaaatcaatacatttcttttccgaagcgaatttccagtgttggctggttattgctgcaagcgtgccgccttcttccaagcgttcatacataagcctgacatgctctatatcctgattaccggaaaacggaggatttgcaataatcttagtgtaactacctacactgtatttggtaaaatcttcatcaagcaatattacgttgttaagggtgtgaagaaattctctgttttctggcatcagttcataacattcaaccattacagaaggacaagctcggtggattgctttaataagcgcgccacgcccggcactcggctccagtaccgtatcatcctcatgtatccctccggcaagcataaccagccagtcggcaacatcggccggagtctcaaaaaactggtattcctgttgaaggttacaccgcttaccttctttcaaaatgggaaacacacgttccggattaaacggaaatgtgaaaccctgtatcttcccaccttgccatgagcctccggcttcttctatccacttctttgcttcagcataagactttttgttaaattgaacttgaggaagtttcagaacaccgtcctcaagagtacaatgtttcaatatctcttccacactccattttttgccttcgtcagcctgctttttcttttcagctatcggaacatccggcgctaacagtgaagatattttttctacaactatgttgcttgcgtccatgaaggcactgacgcaagatatcgcttcgatcaagaaatcggtgtcaacatgcccggtattgtcatagatgtctaccccttcggtcatggatgacagttcattgagctgcgcaacactaccatgtaacgtttcgattaaaatcttttttttgttcgtcataacttttctgtaaataaattcttgttgtgtctacacttccatgaccgagaagatcggccagttgaataacatctttgttttttttcaggaacattttagcgaaaaaatgtcggaaggcatgcgcgtgcatcttctttaaatcaatgccgcaatgtttcccccatgctttcaagtgctgggaaaagccacgctgtgtgatcgggccgaatctccctaccgcaaaaatcccggtcttaccatattccttagcgtaaaccttcgcttcctgctgcaattgcttttggaagaaaaaacgtctgtacttgttacctttacctttcaatgtaacctcaccactaattatatcctcccatgtaaatcgttgaaattccgacagacgggcgcccgttgtacccaataccttgataaaaaagtagtaatccttattgttttttcccttgagatattccaacagccggttatattcctcttcggtcggcacattgttcacatcaagcttgcgctttattttaggacgcttcagttctataggcttcttcagccatttagaaaatctttcgattgctgtaatccgcaaccggatggtagcgggagataatttttcttcttcaagactttttataaacctcctgcaattatccatgtttacctcattggcgtattcgaaatacttctttatggatgtgtaatatacatcaactgtatgagaagagtaatcattgttgtcagtcagccatataatgaaatcatgaagttgtttcttgttcttctccgaaatgacatcaagtttttccaaaggtttcaccgtcttttccctttttccatatccgatgttgagaaaggataatagatcgcatatagctgagcacattaatgaatgacgcaccatgacatctgcattttcacgcttgtaattcaaataaccacggcggttcacttctttggtcatttctaaaaaatccgtgacatgcttgatatatttcccgacagtatcataagtcctgcctgttgcgaataagtaagaaatataatcagttaatatcttctgtctgtcattattcataatttatctgtttcgaatcaaactagaccagcccactcattaatcgtagcattcaaagcccccataacaagcatcttgtcactttcgtcatactccataagcacctccactgtccggtcaccattacaatcattgtattcccttcctgtttgaatattgacaggaagaccgttctcgtggactgcttcaagccatgcctcaagcaatcctttattcatttctattttagcacttttcataatttcttactttagcaataacagacgatccattcttctttataccaatctcgtccaacaccaatacatcaggatattttgtcacccattccggaaaataatttgttgtcagaacaacagtaaaatcaccttgaaaataatcccctctgaccaacgcctcgtaatactgtaactgccattccgggatgtcatcaaacaccattacatcaacatttgtatcaatatgttccaagaaacttttaagacttgatgatctgacatcataaaaaacactacgcttgttttcgcacatttgaagtgccaactgagtttttccacaccgaggagctcctactaatagtattactttcatatcattcacaatttaagtttatcacatttattaatttctactacaagttattcacgctcaaatattttcactccagccacttcttctatcttatccttcgctagttcaggtattcgtacccaaccactccgccaattattaaacgtataaatcggcaccttgcattcatcagcgagccttttagccatctcagatgattcacatactggtaaactgcgcaaataggttcgtaatgccatgccatccattgtttttttcttctttttttcttccatatttaattaaatattgaatattgttttgtagatttataatgcaaatataaatttaaggaaattaatttccaaacgctttaataattaatttcctatcattttaattataaatatgaaacactttggaaatcaattagatgaattatttagaaaaaaaagaattattcaaaaggattttgctgatagaatgggggtaactgcggttactataactaaatggaaatcccaagaaagtattgatgccgctaaattggaggcaatatctaaaatattaaatatacccatttcatattggtttgatgatgaaaattgtcagctcaaccaatcagtcgttggcgatgggagtgcagcctctatatatggtaatgctaccgctggagttatagcagacaaagataaagaaatagagcatctgaaacagttactcaaagaaaaagagaggctaattcaagtattaatgaataaataatattgtagttatgatagaattaaaggctagacctttttacgcctaaatactgggacgtaatcgggacagaagtatgaaaaaagagagattatccatattattaatcagcctattagtggaagcaaaatgtgtcaatagctcgcctcattcggcactataaaatattttgtgtaaatggaaatacgggattcagaaatgagtctcgtattttttattttatacatttgcaaaatgaagaagcttatgaaagaaaagaatcaagtagtgcctgatgaggttttaagcaagtttatcagtcagttcaagacagaagccgatgtgagcaagtttctgaagcagttgcatgcccaagtattggaaaagatgcttgaaggtgaaatggatgcccatttgggatatgaaaagaattctgtgataggaaataacactggcaactcccgaaatggcagttatccgaagaaaatccaaaccgaacatggagagtctgtcatttctattccacgtgaccgtaacggccagtttgagccgatagcagtgcctaaacatgaaagccgtggactttctatagaaaagctcgttatctccctatatgccaaaggaatgagcgtttctgacatagaggaagagatgcgtgagatttatgaaatagagctctctacatctgccatttccatcattaccaacaaggtcaatcaggctgcccaggagtggcagaaccgtccccttgatcctgtttacctgatagtctggatggatggtattgtcttcaaggtacgggataacggtaagatcataaacaagaccgtttacctttgcgtcggactgaaacagaacggtctgaaggaagtccttggcatgtgggttggcaaatcggaaagctcttctttctggatgggtgtcctgactgatttaaaagcccgtggggtgcaggatatcctgattacctgtactgacaatctgaatggatttacggatactatccgcagtatattccctcagtcatccactcaaatctgtgtggtacatcagatcagaaactcctgtaaatatgtggtttataaagataagaaagagtttacggcagatatgaagaatatctataatgcacccaacaaagaggttgcagccacagaacttgacaatctggaaaagaaatggggaggaaagtatccttatgctatactttcatggagaaacaactgggatgatttgactgttttcttccagttcccgctggaaatcagaaaaataatctacacaaccaatctcattgaaaacctgaacggaaaaatcagaaagtacacgaaatcaaagctttcattcccttcggatgatgcagtcaaaaagaccgtttatctttcacttatggagattgagaagaaatggacacagccgattcataactggggcttgattatgaatcaatttatgcttatttttgaaaacagaatccagatataagaacaaacttacagctgaatcctgtttccatttacacaaaattttggacagtgtccctcattccgacagaaggcgacaaacgagcaaaatcggttgtcgctttttctttttcaccttcgcaaaccgctgtaaatctgcggaaaatcctaaaaacttcattctcgttttctgttcgataatcatcatttttcttgtcgaagtaaattccaccaagatagactaaattttgtattttttgcctattagaaaaatcactatccctccacaaactgcctaatttacaagatatttcaattgtttgattgatataattcatcatgttcgataaatttttccctgcatcttcaaggtctcgtctgatttctgccaatctcgaatttaattcgctcatagtagccgtatatatttcactattaatttctcccagaccaaacctaactttaactgcatttattcgattttcacactctgtttttcgttttaaaaggactttctttgtttcacccttactttgattgtattcttcaaaaacctttcttaaaacgtctgtaagtatcggaataaattcatctggtatattatatccatttaagagattgatatacttctgatgtagtttctctgtactatgattacttttacaccctttcttattacatttataataatcccgtccacgtgctttcactgtgtatccagtcaagtaaccgccacagtctgaacagatgatatgccttttcaatgggaatggttcagtaatttctttgtgttcatatcctgcattagatatgctattcactttattaaacgtagcctcatcaattaatatctcttgattaccttttataacttcatcgcccaacaaactatgttgtatgaacccacaataaaatggattatgaagaattttattcaaatgttttcggtcaatgactaatcccaatcccttcaaacgttgaacaatttctatatctccaattccttccgtagctttccaaacaaaagcattacgcagtatcttgcctttttcattcactgtaagaacgtgttctcgacctacttttagtttatcataacctagcggaggttttgaataccagttgccatttcgtaaacactccaccatacctgtgatacatttatcctttcgaaggttattctcaaactgattaaaaagaaagataacatcttccataaatccacctgccgcactatctgggtcagtagcctgtgttgcagacaccacatatattcctttagctttgagatatgcttttgtcatcatcgcctcataaccagcccgactgaaacggtcaaatgaatagacaagaattatatttatctctttatctctagccacctctgcaatcatttcacggtatagtttaccttcaacttttgcactctcattcgtaccgccataatacttttttatacgaatagcatgactttctgcatattccgtacatatccttctttgactttctaaactgccatttgtatcagcttgccgctccgttgacactcgcgtccatacagcagccactttatttgtcaatttagaaaactctactactttctctttactttttttcttactcatcaatcgttaaattaaaggttaaacgtaataacacctaatgtatagaagaactccagtatctttttttgttcttctttgtctaaaatacctattgcttgaaatttcttatcataaactttcaattcatcctcattaaacatttgttacaaaggattatttgccatgccattgcacaacttattttcacacgttcatgcaaaatccacagagcagggaagtgcatatacatgaacgtgcttcctgctcctaacttgttacaatatgattgaatttgaagtatttttcgtggtggatttgcctgtcctttatgcaaatatacgacttgtaagctattttaccactccgctaagttaatttacattaaagcagtcaatttacgaagagtatttacactcgtacccgttaatttagctgtatttcggagtgaataacctcttttaagcagtctaatttcttctgcatattcttctttcatggtttcattgcttttactatatcctacttttcgtcctaccttaccgccattgctacggaaattctggtaaccacttgcaacacgttctctaatagtcttgcgttccattcgtgctacttcggcaagtatagtgataagaaactggctcatagggttgatttctccctctggagtaagcgtttcaatattatagttttggatgaatactgatactttattctgatttaagatttctatggcttgtaatacttgtagggtatcacgtccaagtctggatagttcggttactattactttgtctatattgtgggaattgatgtagtcaatcatattcatcagctctgtacgttctgtattcttttttgctccagatactttctccgcaaatatagcctcaaccgtccagttgtttgctgaggctaatacctgcaaatcatttatttgacgctcatagtcctgtgttccgttcgtacttgatactcgtgcaaagattactacttttttcatggtgttacttgtttatgatgcaaagatagtgatgtatatttaatataaatcatttataacgttaaataaggctagaaatatgataaatattaaatatttatcattcctttgtcagataaaaaatagataaaatgaaaaataagcaagaaaggacggttattcatgtagaaatatctggacttcatttctactttggctctttaactgccatttataccaaattcactccagagcaacttggtgtagcattggggacattacgaaattaccgagtaacaagtgataaaccgtatcaaaacagtaaatgtattatccgaaaagggattttggtaacagtacaaaaatctgttagttaagtatcatcgtttgataggaatttagtatctttgcaatggtaatcataaagagataagcctatggtataaaacagataaaagacatataaaataaaaaagcgttagcttgtattcttgcttttcagaaaatcgccaatttaatgaagcaaccaagagtaaaagttgatgctcacgcttatggcgtgggcttttacttgtttatggttgcatggtgtttggcgatacctctgaaagcgtagacaaagtttagtccacgctttttatttgtctatactacagcaacttggactacaaagaaagtttctaacagaaaaacgaatttgaatgattacagtttcatataaagattttatttctaatagtggaaatatccaactagataaaatagaggacaagttacgtaatctttttttggtggatagtaagataaagttgaaagaagtagataaaatctataccattgataatataagtgattttatccgagatatatctttgttcttaaaagacgaacaaaaatacagtgatgaaaacaatcaagatattaaacaatccatgcaagtagaacaatctataacggtggaacaagaggatgactccgagtataatgtttatagaacatggtggggaaaaacatttgcaatatttgttgtggtatggcttatatctatgttcacttcccatgattggggaactaaagacttctctagaaagtattctttgagatatggtgtttcatattcagaagttgaaagagtagttggatatgatataccaatgtttcctattccgtacaaaagatataaaatagaatataatgacgggagtgagaaaacaatcggatataaagttttaggattaatttttataacggatgagatatgagtgcaataaatggaaaaataatagaacggatagtaaatatccctgctaatactgcctttgaatcattttctaaatttcttaaattgaaaaaatattctatcggagaatcaaacacaacaactgggcaccttgtttttaaaacgagtttgggtgggcttagatacatactctataatggcaactatatcttttcttgcgacataatatcatttgatgaaaatagaacaagaataaagttacaaggtgtatttagttgtgatgcagaaataaatttgtttgagtctcttttcaattcatctgcaaaattgggagagaaaataattaaagaatttgccaactattgtgaaaagagataggtatatgaaaaggattatttggatgttatgtttatgcagtttttttatttatggctgtgataataagaagaaaatctcaatttcaactccagaaaaggatgctaaagaaatgtctgtatatcacaaacaagttctgaaaggagaaatgactataactgaatttgaaaatatccttaactctaaggttaatatgtatataaaggatggaagagatagggatgaggttgcactctttttagacttatcaaaagagattatgcgtaataccgctttagaataatcttttaggttaaaatgatacaagaaaaagtgtatcaataggtcttttataagattaaaatgatacacttttctttttgacacacaagcctcatcaaagtaatagattacgtattttttcaatagggttttcactggttgaggctgatgtcattgcatgatagaccgtttcaaattttttcattcgttttgttgccccactgcgtgaactgaatttactcctaacatcttgctccagtagttttaagtcaccattgtacctttcgagaatgattttcattgcccaattttcgtaatcatcaaaagttgtgtttggcatattggctgtagaattactgaaaaccttgtcaaattgagtaaggatagggtttgtatcggaatttaatacactggatattttagtgtcggctaaattcaaatagttcattatctttttaggtgtgtctaatgtgacttcaaatcgggtttttcctttgaaatagttcattactgtttgtggttgtgataaactatttaagaagtctttattatggctggtacatatttctttttccttattgtataagataattgtttccgtacaatctttggatttcacatctttagtaaacataatgccctctttatcgtaatgtgcccacttgaagcgtctatagttgtttacctgcgaattaagagcgtccagaagattatcacttagaataaggtttgcatcataagttacatctactgatgtaattgccccatttgataagatactatctacgtcaatatcacaaatatttagttggtttatattggttagacattctttgatagtatctcttgaaattaagtctggatatttttctttcaaaatcttactggaaaattcaagagttaaggtttgttttatatagctgacagctatataaaggttataaggtatatttatatcatctttagaactataaaatatacctattttctctccactacgtgaatgaaacatttcattaaacttcactttagtattgagaagatatttatagttggatttaattttaattctatcaaaagtgattaatcgtttcgtttcatattgcgatgtcattaaaaaattaaagttattcttttattcttgtgggaaatgtactctgtaggctacaatttccccctttgataatggagtatatcaaaggactatgaaaagagaggggattactgcccctctttttctgtcttatcacttggggtatcatctggtttgactggtatagtcttccagtaattactcatgccttgtgatattgcttggatatgcgaagctgacttgcttctacctcttaatgattgactgattttcgctttggtatcgtctccaagattacgatacggtctttttcctatattatccatattaattgattttatactagataaatagtaaaatgaagtaagaatgtaaagaatagtaggttgatttcacagaaaaaatatctggaccagaaaatttagatacagagtcgtttgttattatcaatcacgcctactaaaatacaatattcagagtgtcgggttacagtgctatttcttttcccaaaaggaaataggcacttatttccccttcaaaatagtttctgtttgtatattactgtacttgcctaaaaattggataatcttctcaaaatccactataaacttgttcgataattcgatagtgtagccgacactgtaaaggataagagggtgtatcgtaatgaacgatgcactccttttttcatcatgccctatagtaaccagttaactgaaatgaagacttatccaagaattatgagaaaagattattcgagaattcttgcccgatttcaaaaagttacatttttccctaccatagtagttggaatcctgatacaagttctgccggatcctgcaccaagttctgtgaaatcttgtgccaagttctgcctcacgacctcactcttccagtgaaaagactaaatatttacttttagaaataataaagaaaaatatagatagcgctccagttctgccacaaccgccaatcgggagggaacggcaaaccaatgtcctaaagcataaaacctctgcggttaataaaaggccggttaccccattacatgaagtaaccagccatccattatcctgttacctagttaattatcaaaacttataagctgctttacgtaactctttcactgaaccaaatggtttattgggcttcaggtaacgacccatgaacttataaatgtccagacgaatcttgcttgactcataagtgtctaaccgatcaaaactatgcgcaccgggagcacgctcaaatatcttatattcaaactttttgccttctgctttcaaagctcgaatcattgattccacttcgatcacatttacatcatcatcactggtattggtgtagataagtaacgggtctttcaacttctccgcatgccacacaggagagcgccgtttgtattccgcaatattatccttggcagtctgcccgatatgattcttggccgaaaagattttgcgataactgtcgctggcatatcccatacgcatgattacatccgaaaccggtacaccggcgaaaccacatttatattgtcccggataattgaaaagattcatcagcgtaatcataccaccatgactccatcccatgatacccacacggttaccatccacaatatcaaaattgtccaccatatagttacggctgatatatacatcctcattctccaatccaccataatcaatattattgtatgtacccgaaccatatcctgtacttccccggtaatccgctgctaccacaatatattcctgcgctatcaactcgcggatgatatgagcataataggtgtccatatcggcatgtaccccactatgaggaaatacgattaacggatatttcttgttttcatccacgcttttgggaataaaaatgtatgctctgaatttaagttcgttaccggcactcatcgaagtagggttgaactccttccaacgcggtggtccacataatattaccttatctacatgggcgatatcacccactttctcgtaccacaggacatcatcaatttttttcattaactggtcaaactgatgaatggacaactgtgcccgtactattccgggcatactacataggcagcacaccaataccacaaattttactattctgtttttcataagcatatatttaaataataattatatagaatatcaactcttggggtatcccggattttgttccatttcaggactaaagataaactggtcctcaggaatcggcaacacacatttataaaaatcccaatccacttcttcgtccacactgggcaaatgatatcctcccttccgaataatagtcttaccattccgcagcaaatcaaagaaacgatgtccttcacctaccagttccttacttcgctcgtccaaaacacgatccaaagtatagtcagccattgtcacttcgttttcaggattaccccgtttcacaatatcgttcaaatagccaagtccctgaaccgcagcatcaccacccaacttacaaccagcctcagcagcaatcaggtacacttcggacaagcgaaggaccacattattacattccagcggtgcagtcttcatgtccgtccctctcagtttgtacaaccaccataccgtttttcccgcatatttattctcctccagcaactgcccacgcacatctcccggatcagccagcatctgctccgcatatttctgagtgacaaatcccttctgatagccataccagttcaataaatacccccatgaatcccgtcccggagtatcatccacactattggctatctcaaaaaacgattctgagccaaacttggtttccaccgaccaggcagccacatatttctcatgcggataaagtgcatagcttcccgatgcatccacatcctttatcagttgctccgccatatcaaacgctttccggttatcattatgatacagataaacacgagccagcaatgcacgggccgcatacttgttcatacgtccgttatttttctcttcggacatcaatgtaaccgcctcttccagcgtttctataataaaatcgtacgcttgagcaacagtagaacgagaaggattttcgtatgttcccaccaaatgatctatcaacggagcacccagtgacgcaccattatctttcgtataaggatatccaaagcaacgggtcaaatcaaactggcaaagcgcaatcaccgccatcgtttcacctttcaaagcattcagtttcttttcatccccactttcaatttttccttcggcaatagcattcagaatattccacgcctcacgaagaatataaaaaggtcgtccccacaatgaaccggcattcaaactattaggacgatgattgaacatatagcatgtattgcatactccactttcctcagaactctgcatatcatcccccttcatatctccataggcaaacatagcagccccataatatccggaacccgacatcagatcatacaatccattcaccgcattatccacatcggttactgtacggaaagctatagcagtaggaatcttattgctaggagctgtatcgaagaaatcaccacaaccggtaacaagtagtgaagctaatcctaaaataaaaagtatttttttcataatggttctgtttttagtgcaattgatgattaaaatttaagttccaacccgaaagcataagttttcaatggaggggtgtaaaatcctaccacgccactcatctcaggatcatattggccgtaagctgcccatgtcaacaaattcgtacccgagaaataaatacgggcattccctattcctaatttctgcaaccatgctttaggagcattcaatcccaatatcagacttttcagacgaatatgatccgtagaatggatggcacgcgaagaattatagttacccccttttttattcccatatacaaaacgggggacatccgttatatcacccggtttctgccaacggcggcgttgctcggtacttttattgcttatcactgaataaccatcatcttgcagaatataggatgcattatcatacgaataaccaccgaaactataagataaattgaatgacaagtcaatgaatttataattaaaggtattcataaagcctcccgagatagtaggcgtaatatctttcaacggaataggacttgcctgccccggatcggtcactttatttttggtataattgccattctcatcctgttggttatcataatacaaggcacttccagtctcaggatccacccccgcatactcacgcagataaatagtattaaatggataaccttccttacgtacatacctgccatccacaaaccaaggcagatctgccagtttcagaatcttatttttattatggctcaaattgaaggcggtagtccagctaaaatctttcgtcttgatgttattggaacgaacttcaagttccacaccggtattccgcatctgtcccacattggtcagcagagaagaaaaaccgctgatggaattcaattgcttgctcatcaataaatctttcgttgtacgcgtgtaccaatccaaagaaacattcacacgactgaacaagccgatatccagccccaaattcagtgcataattcttctcccaagtcagttcctcattccccaatgtactttcccacggagaaggttttccattataaaacgcccctgtggtataagtactctgataaccataatatgaagagggaagattcccattcaccccataggaagcacgaagttttaaatcacttaatactgatttcaacgactgcatgaacttttcctgagaaagtctccatgaagcggacaaggaccagaaattcccccaacgagtatcgggagacaagcgggatgatccatccctgcgaaaactgaaactggcataatatttatcaccataagaatagttcacactagccacataggacattaatgcatcttcctgcaatttctggtcagcatctatcggatcggctgcatttcccaatgaagtgttgatatcctgcccgtaagttttctttgcagcatacaaatcctcataatcatacttcatcacctcgaaggcagcgaccgcactaacagaatgtttaccgaaagttttagaataagtcagattattctgtgaagtataccgcatacggtcagtcatctgcatacgtccccgtccctgataagtagctccatcacgtccttcaggagactgaaagaaaaagtcctttgtcaacgaataatctaccgtaaacacactggatatcttcaaattgtcccacacattataagctattttagccgtacccatcgcacgtaccgtccgagcataataatcattcacctcggcctccaataccggattatatccattgttttcacgatacccgctggcatacgttccatcctcattataaatgggagtagaaggcgtcagattcacttttgatgcataaatggcacttccataaaatttaccctcaggtaaatgaacgttctttgtccacgaaaaagaagcgttcattccaaattccacctttttatacttgttacttgcatccacacgccccgtaaagcgctccatttctgaattcagggaaacacccgtctgcttggtatatcccaaagaaccgataaaactggaattttggttgccagcactagcagacaggttataatcctgttgataacctttcttgaacagagcgctttcccaatccgaatacccctgaggcaggcgtttggcatactggtcgatattcgcatcagcatactgctgtgcctcttgttcacttactcccttatccagttgaaaattaaccagtccttcatgaatcaattccctcctttcctcacctcccatcagcggacgatatgtataagcgaaatcagtgattccatattttgccgccatattgacacgaagtttaccttcttttccttttttagtagtgataagcactactccattagcacctttcgcaccatacaatgaagccgaggctgcatccttcaaaacagtgatactttcaatatctgccggattcaacgtttcaataactcccattcctcccgcttcggacatactggtaaagttactcaagtcataagatggaataggcactccatctaatacatacagaggctcggtggaagcattcatagaagcgattccccgtacccgtaaagttgttttcgcaccgggttgcgaagaagtaccggcaaccacactgatgcccggtatattcgattcaatcatctgccctacggatacaacaggtaatgcctccagtttttctgtagtcagaacagaagcagatcccgtataagttgccttcttgaaatctccatatccggtaacgaccacttcgtccaacgtattggcatcttctttcaatacaatatgaaagtctcccttcccttttgtcggaatatcctgtgccagatatcctatatagctcacaaccaacgaagcggattcgtccacttccaacgtaaactttccattaaagtcggtgataaccccattggtgcttctacctttttccacaacattggcaccaatcagaggttctcccattacatctttcaccactcccgtcactcttttctttttagaaccaggctgcgaaacagctttcttctcgatgaaatagattttgttgtttctgatctcaaaagtaagatcagtgcctgaaagaagtcttgtcaatgcctccttcagtgtaacatctttgagttgcatggttaccttacgattcacatcgaccaactggtcactgaaaaccaagctcataccagtctggcttttaatagatgccagtactttttccaccctctcattcttaaaatctaaagagactttttgcgactgtgctgaaacagtaaagccaaataaaaggactcccaacagcagtaatgtcttcattttggttcttgctttcattttcatcaatagtattagtttgaaacaaaagaatttcttatataggctaacacatcactccaaagaaggtatgagtccatttttcattttttagaaaaaaaatagatgcaagtgtattcactcacatctattccacttttcttctataaccttcgttatttagaagttacttcaaatacaccttcttctatttccgtaaaaacaatattcgaaacggcttccaaatcatagagcacatctgatgcattgacttttcctgttgacagagtaaacctgttcttcaataccgcagaatctttcactatgaaatgaacatcataatgtctttccattacctttataatttcaccgagtggagtcagataaaaattaaggctgttgacacgccatgccgaaatctgttccatattatccggacgggagatcaggcatttccccgactgacggttatattccgcactctcccccggaacaagtctgtactctttcgcattatgatctctgaaaagaattcctccttcatccaaggttatccaaatattgggttcggcggaatatgcctttacattgaattttgttccagttactctcacttccaccccttgcaaatccaccttaaaagggcggttctcatctttggcaacattgaaatacccttctccccaaagctccaccgtacgattgaacaatccaaactgcttgggatacctcaagcgagaatccgagttcaaatgtacaatactgccatcctgtaaaatcacccggatctgttcaccataaggaacatttatgtcagcatattccggttcagagaaaatgcccgtccggtttgccaaaaaaaacaaggaaacacttaaaaaaacaaacggtaacagcacagccgccacccacatccatctgcgaccaaccgggcgttgtccgcgctcacattttatctcattcataaaacgcgctttcatctttacttcaggtatggaatgcgagtcaacactttccggcatttcttccgacaacatcccgatttcccagtcaaagcgttccgacaaatacttattaccttcttccgtagcaaaccaactaactactttccgagcttcttcaggagaagctttgttgtcaagcactttatctatcaccgactcatctatcttcataatctattttttttgtatatttataataacacctcatcacaacaaaagtatgagtacatttcagactattaaattaatccatatcacaggaaaccatataattaaagactctatctcgttacggagggcttttatagcctgtgtgtaatgggatttcacagtaggaacagttatccccatcctgtcggctatttcctgattggataatccatattctattttcaacaagcagattttttgtttctgaggaggaagcttatctatagcaacccgcaggaattttccgagttcaccattttcaaattgtgtcaaaaagtcgtcttcatcttcatcattcacttgttgggccatttcgtatagtttctcgaaaaccaaactacgatgcctcaattcattcagtatataattctttaaaatagtaaatagcaaactacggatacccgactcaaagctaaaatttgtccgctgctcccacaatttcataaaaagatactgaatcgcatcttccgcctcttcttctgatttcaaaaaacgataggctatggtatataataaccggttatagcgttcaaaaacagcggcaaaggcatattctttcccacggcgaagatcgtcatatagtttctgatcaaaatccggatattgattcataataaatgcttttcctagttttattaaaaggacgacttaacacaaagatagtataattgaacctatcttgtctcagaatactcaaaaaatatacatcatttcgttttttagttctagaattctttacacaatttactccccaactccagactccgaaagttacgaatatcccttcttataaataacagttatctctgatataaaacttggacccgaaagattatacatcttacaagtgcaacatatataatgataacacctgaagatttataatgtgtcacggcatcttctatcaattaaaatcataattaaaccaatcaaaataacatttaccgcctattcccaacgtattatatgaatacaagcccacacgcgcacctttccaatcgccgaactttaacgaataagcatctccacataaaataaaattacggttatcaaaactatagaacaactggcagcgattcttctttgcatccaacataacacgtaaatagatttttttaccggaaaccatctttacttgctgaacgtcaccatttttttctaaatacagataatttttaccttcctcacgactaatgccaattccgttataaagactgcctgtgcagaacaatccacctctttgtccatcagccagcgctgaaaaatcaagcaacacagtggctgtgcttagataccccatacatttttgagttaacatattgcgagattctcttaatgttgcagccttcaaggctttcaaagcaagccagcccctacgctcatttaaactccaatgagtattcactggattatgattaaactgccattgcagccctaaagtgtaagaattgaaatcatcagtcgtttgagggtgagaaacaagaacacttttgcttacaccaggctttgtccaaacctttaccggctcacctatcccattcatatccatatccacccctatcacgggccaattctccatccaacaaacaggctgcaaatgcacgacacgtcccaaaggttctgtcagttggaaatgaaaaaaccaccattctccttcaggcgtatctactaaagccccttgatgaggaccatttacagtagtgtttccctgttccaagactactttccctcaaatccgcaactacgcgcctaatatgatacagaagcgaaaagaatctgcatcgttagtaaaaagggggcacagtgcatcgaatgtcaccataaagacatataaatgccccttaccccaccatgcgacttgaggcaatacgcaaaatcacgactataagttgtcggtgttatccaaagtcattctggaacacattggcataagcattgttgcatgaatagatattcagcacatacttccttgatgtcctgacccatttggctggcacagagatgaacttaaagacaaacgtcttgatgcggcttgttgctttgagtccgaacctcttcacgtcaagcctcgccatgatgaatttatagaagttgcgtatgagtgccataagcagaagaaacaccgtgttttctcccataaaggattttggaagcctgttccagccgaatccgttattcatatcatcgaagatgcgttccttccctccacggaggttatagaattcgacaatctctttctcggaagactcgtagtcatttgtaaggatgcagcggtaggtgtattctccttcccacaggtcgagttcgccgtctatccgcttctgtctttgaatcacaagacggtatgccttccctttccatttctcgatgagaatggaggccagctcaaactcaatgccgcccaattccactttcttccaacctctgagggcaaagatgtcattgtagagcgaactgcatcggttagcacggatatagaaggtcttgcagtgtttagcaatctcttccactatctcttcagaacacgagccgcaatcagctctgaaacggttgataataagcttgttttgttcaaacctttcaaagaacctcttcagcgtgtccttctggtggaaacggacatttgtgttgccgtcgctgttctcaatgccgacaatcaagttgccaataaccgccacgccagggcgataaccaaggaacttcttgtatgtaggcttcgcatcaaacttctcagcctctatgaactggtggtcgaagtcaacgtcatacccctcgccctctttcagctgccctgtggacaataggcaattgaggagcagtgtattcagcttgtctgccgtgttgaagtcgtaggtcttgccagtgtcggatgtgtaggaaatgttatcctgggtcagttcctttatggctctaagaatcgtgtcggcactgcatgtgcgaagtgtcggatgaagcgaaaggtggtacatcagatgagtggtgacatcctcgatgcatgagccgccacaaaaataaacgctcataagcgaacggatgatttcgctgtattgataaccatacagcctgcatctcataccgagggttgagtcgattacagatgagagtctggagtcaaattgctccattattgaaaatattcctccaaaaggagtgagtttctcggatttaattgctacctttgccatgtctgtcgggtttgatacatattttgatttgcaacactaagataggtgaaaaatctgacatggcaaattcctgagcaactttttgttgctcaggtacttaaaaagttatatttgtaatagtgttgcggaattaaggctttcttttcgtatggtccatagatattttttgaacgtaaaatagtctgccatccttcgcctactcctccttcaggaatgcttagataataataaccatgccgtttataaaatttagttccctcagctacaggacctgtataaataactttcccatcatccaacaaagttttaccatccggagtcatacgatgtagataaataggacctgcccctaactggctacgccccatgtaagcctgtccatcctcatcccaaaaaggacaggggtcctcccagccacctatattcttcacacaatgcagcggcgtccacgggccatgaggatcagtagcagtactcatcatcagtccttctctaggtgtacaaaaataaatccaaaatttaccatcatgaaaacggatagcaggcgcccaagatcctcctccataattttcattattatcccatccgggaaaatcaaaccgattatacacttgactgatgattctccagttcaccatatcatctgattctaacaccggcatcccgatataatgaaaatcagagcaaaccatataatatttatctcccactctaatcacatcaggatcagaataatctgcatttaaaataggatttatataagttccattaccttggtcaccccaagaaacagcttgtccttgtaccttttccgacaaaaacagcaaaacaaacagaaaagccaaaaagaaaaatctcatagtatcattcatcattaaaaaagaaaattgccttcatcattcctaaagataaatgataaaggcaatacactaaattatatacaatcaatcccaaatcattcagctacaacttcaattacgcgactgttaagttgctgtgcagtaaacaaattcaatcctacattcatcaaaaattcccctgagaaaacctcaccattacctgataaagaagagttggctccgggcattaagttaatttctttcacacgatacattttgtctgcatcaagcccctgcaaacgcaccggcaatattttttccgcataacgaggatgaatatcgaaagcaaataccgctgctttatccttatctttgcccacatacatagtagaggtatgattactgccataaggagaaactaaacgatacatatcaccttccagaactaccggcttcaaacggttataattctgcacagcagtacggcaataagtttcatcatccttactcatatccgctaatttgatatcaaaaccaagtttgcacatcatagccacatccgtacggaatttcacactgctattcttattccatgtagtaacatgagcgcacattgtcttggctgggaacacctgtgagaatccccactgaataaataaacgttcaatagggtcagtattatcactaggccagaattctgtaaaatatttcaaagcctcatagtctgagcgtccaccaccaccggaacaaagcatcatcggcaagttaggatattttgctttcacacgctccaatacattatacaggccacgcacataatcaatatataaatgtgactgtttatttttcaaataaacagagtaaatattcgtaataggactattgcaatcccatttgaagaaagcgatatcaggatatttggtcatcaaattgtccacaactccgaatacataatcctgtactttcggattgctcaaatccagaaccaattggttacggaaataatactcgtcacgattcggaagatgaatcacccaatctttatgcttttcatataattcacttttaggattcaccatttccggttcaatccaaataccaaactttataccttttttcttagccgcttccgtcagataacctacgccgtgaggaagtttatcagccgtttcatcccagtcacctaatccttgatggtcaccactgcgcggatacttgttggcaaaccaaccatcatccaacaaaaacatatccacacccagttctactgcatcatccatcagcttcaccaatttcgcttcatcaaaatcaaaataggtggcttcccagttattcaacaaagtcatacgagtctggttcccatccttcacctgatacttacgggcccaatcatggaaattacggctagcctgtcctttacctgtaaaactgtaagtaaaatagaaatcgggagtacgaaagatttcattcggtttcagactatattccgaagcatacggattaattcctgatataacacggagttcattcttattatccacctcgaatacaaaactgaaattacccgtccatcctaatgttccgaccaacacttcaccttggttctcttctgattttccatccaatgaaagttggaagaaaggagagcagaacatattggcacgtgctcccaatttagtatcaatcgtttttttaccaaattccaaaggttgttccttcacatgcgcctcactagcccagtctcccgagaattcagtcaggaaatagttggcacgattcaagtgcaacatggaagacgcgtacttatgaagctgcacaggtttcttttcctggtggctgatttcagtgaaagtctttatcaaattttctttctgataagccacataatgaagttttacagttacaggatatttatcatcctgcatagtaatcaccacttcatctacccccggcgacacttgattccgagtatgagaaacatattttaataaagtagaaggattgccatcattatgtactatatgaatagccggttcaaaataatcttccatgccatgagtaaggtatgcttcgctaccctgtggcaaatgggcaatatctgtagcataattcaacttctttcccaaataactttgatatagacgtccgttattaccaacccggtaaataaggtctacattttctgtactaattttaattactggcttatctgccgcttttaacataaatgatatgcataaaaaacatatcaagaagaataatctttctttcatggtattatttatcgattaaaattatagtgcaaaaatagggagagaagctcaaaaatccctactcaaatgcgccataaaataagaattttgacgcttataccctcaaaatcatcgaaatcaagcctgtattgtaggtaaaatcaaggaagtctgctatctttgttatccaattctaatacatggatatatgccacgaattaaagagggatttaaaggagaacgcgccatcgtacttcctgcttttctgattgaagaattaaagcaagatccgttaggcagcgaactttacattacagatataggatattatcctcatgcctgttttcattaccggaaacgcaacaccgaggaagcaaccgagtttatccttatttattgtatggagggagaagggtggttcgagttagataaacatcgatatgtagttaccgccaaccaatttttcattctacctaaacaccaggcacacgcttatggcagtaatgagagaaatccctggactatttactggatccatttcaatggaacaaaagctgcatttttcagtgccggttttgaccgtccgaaagacatcactccacaagaggattcacgaatcaaagaaagattagtactcttcgaggaaatctactcgtccatcagctccggatatagcaaaaactatatgctttatgccactaccagtcttttccattttttaggttccatgaagtttattggtgaatatcgagattgcggttctatgcgcaatggttgcagaagcaaggatgtggtgcaaatagcgattcatttcatgcaagaaaatttgagcaaaaccattcgcctagcagatatcgctgcggaagtaaacctctcagtgtcctatttctccaatctgtttgaagaaaagacaggctcctctcctcttcgatatcttacctatctcagaatacaggaagcctgtcactacctggattttactaacctaaaaattaaccaaataagtcccttggtaggctatgaggattctctttatttctcccggttatttactaagacgatggggatgcctccatcagcttataaagaaaagaaaaaaggttaagacttacaccatctaccaacagtcggtccggaaaggggcaaccgggagcccgttctctccgtacaaattacaatccggattatctgcccagccataacgtgcagcaagaggggcaggaacttcagtagaaaaaagtataatttttccatcatggaccatagcctctgccggataaaatacacggtccggccctgcaatggtaaagccttttaaagttgtacctttaatctgaaatccatcttgcttttgtccgaaatccaattccatcttgttccccttaattatataattttggaatacaggagccgaacttgaaatattttttccataactaccggccagggcaaccaaagctaaacggcgtcccacctcttgcttatttttaggatgaatatcatcagccaaaccaatatcaatggtcacggccataccaacttggtcaagttttaatgctttagtttgcgcttcacgcaaagccgcccattcggaatccggctgtattttcttggattccataaaattagccaattgtacaaaataaaaggggaaatcactccgccattgtcggcgccaatccgtaatgagagcaggaaacaaatctccatattgttctgaacgacctacattagcttcaccttgataccatattactcctttaatgggaaaagcagtccatggtttgaccatcgcattgaacagcaccgtaggataactggagctttgaacaggagaaatcggtgcaggtggaaatcctgttaaagaaagtccgatacgatatttccaatctccagccaaactgatccgctttccatcagcttctacataaaggtcctccgccttgccatgaataccgccttctccaccaaaatcagaaacacgaacagcaagaaccgccttaccagccttcactagttttgcaggaatggtataagtacgcggtgtcatatagcctgcccctcgggcaatctccaccccattaaaataagtgatatcttcatcatcaatcattcctaaatttagttttaacggtttaccaatccattctgctggaatttcaaaactacgacggaaccatactactccatcaaaatttttcaatccattcttttcccagtaatcaggaaggcacatatcccaccattgtccttctgacaagtccggtgcaatccagcaaggcttatcttcctccattcccttatcttccttagaaaaaagagattgccactcagagcgctcttgattataggccttttccatacgaatagggtcaaagtccaattgttccatcttagccaactcttcacgaaagcccagcacctgtttcaatgtttcatagctggtccacgcttcagcaggcgttcctccccacgtacagtcaatcacacccacagggacatttaattctttccataatgaacgggcataaaaataagcgagtgaagagaattcaggaattgtggcggaagaacattcctgccaacctcccatagtagactccatatcactcaacggaattactgaagtattcttcttcacttgaaacaaacggatagaaggataattcgcctccgttatctcctgctcataattcatgacttttccccaacccgcaacaggcatctccatattagactgaccagaacaaaaccatacctctcccaccattacattttttaattgcaatttcttaccatccgtaaatgtcaacgtataaggccctcctgcagcaggagtaggcacagacaaactccaataaccgtccttattcacctgagtcacatacacttcattattccagcctgtagttacttttaagattttacccaataccgctttaccatgaaaagtaacctccgtattttgctgaagaaccatattgtccgtaaagtaagcgggtaagaccaccttggcgtaagaatttacatacgccaagagagaaacacataaaaacaatattttatttcccatatttaccaaattcatttgttccactattatattcttctttaatcatacatcatcggaagctacaccaatctgaatttcaaattctccaagctccaccaactcgcatcttatttattattataaggtgttaccaacaatttataggaaccaccttgcaataaagcctcatcaaaagtaatacatatatctttggtttcacccggcatcaatgtgaaataattgtcattcataatagcaggaagaatacgctctccatccgaggtccgaacagcctgaacatatactgcaaacgccacaccttttgcagactttaggtgagctatagctgcccgaatctctgcctgaccatttttacgcaacaatttagaagaaactttcaattcggctgccggcaaagtattcaaagccgtaaagtccaaacggtcgttgccacgccaataattgttttcagaaacaacctttcctgatttatctttcaacgtcaggcggataaaatgtacatcgctcaaaccctcactaggctgtgttccacccaatacatcaaaactccataatgaataaccaaaccaccaacctagttccgtcccaaacatacgtacataacgggcatcaacttcggggaaagtaatttcatctattcctccacgtccttcatcagttttatatacttctttccaagtctcggcgtcatctgacacttgaatcttatatcctttaccaaaagatgcctcccaattcaagcgaaccccacctacgggttgcacactgcccagatccacataaagccattcattttccgcttttgccgctgcccaacgggtatcttttttcccatccgtagcatctgaaggctgtccataagtggtacttgaagcaaaggtcggtttatttaatgacagatttttacgctctttattgaaatctatcgtaaaacattgcacagtagaattgctaggagagttcacaatagctgattttgtataagtctccacagactttccatccagattgtaaacttttacttcagcagtcaaaccttccatatcacatgctgtggtattagcaatcttcacaccgtccgtcacaggattccaaagaatatgcaccggttcacaggctgattttgctccccaaaaggctcctgtcaaatcataataatagtcataagtttgccaaaccatagacggatatgccgactgtcccatccaagtcatgatacctgatgcatcctcccacatacgatccagccaaccctcatacatagccttattagattcaatattgacaagctgagccttacggcaataatcttcaatcccttcgggcttgccaaaacctttggttatagaagcatcataacgatcgggagctgcattaaaagcattttggccaaaatagtgcttgttccacatttcatcacgaggccaccagttctccttgggcataaatttcttgaagctttcaaaggtaggaactacagctgtgccaatttctgtacgaaatccccagccacgcgccggatctccttccaagccatcaggatatttagtaaaataaaagcgaggctcaaatgctccccacggaccactaccggtcaagccctgagcatgggagtttgcttgaaaataacgatcacctccatcaaaggtcctaatattttccgccatccatccttctaaaggaggctgaggattagattcattatcgccacaccacacggctatactagggtgattacgcacacgttttattttctccatcatattattattgaacacattgaggtcataaggcaaattcggattagagtttatccaaaaatcatcccataccataatgccatatttgtcacatgcctcgtagaattcatcatctgtaacagagccgagccaattacgtatcatattaaaattcatttccttatgcaggcggactttggtatcatattcctcgccacggcaacgaagcatatattcagacatcccccaattcgctcccttaacaaataccggaatatcattaatataaatatggaatgtattgccctctttatcataagaatatttctttataccaaaagaaacatctttcgtttccgaaactcttccatccaccatcacctcaaacttacaatgataaagattgggttctccatacccatttggccaccacagacgcggctggtctatacacagttgtggaaaatagcgtttgtcaaacttcacctgttcagtagtatgggcattcacgtctaattctttttgaaaaacaatgtttcctggggtaattgttccgcgcaccaataccttcgtcttttctaccgaattattcttgacatcaagcgccacactcaaatccgctctggcacgggtaggtaaattagtacgtatccaaggatcaattaaagtagctgttcccgtattagtaagaaataccttatcggttataccactattcaaccccggcacataaggcatccaatcccatccgccactagacaaataggttggactgccctgattagccaatggagtatcaggcatatgaacaagtacagccaatacattttctttatcacgatttactattgaagtaacattaaaatgtccacgatgcataaacccatccagtttacctaataatgttccattcagatagacttccgcacgacggtttaccccattaaaattcaaccatatcaattcttttgtaaaatcagcaggaacacggaatgtagtacgataccaaaagctacagtcgtatttgtcgcgatttacctgatgaatattgtcaccaaagttaggatctttctccagccctgctattacatacgaattaaaagctgttccaggcacaacagcatctacccaagcagaaacattgtatccgtttccacaaagtgacttcacatccgttccgacttcagcctgaggctttaacttccatttcatttgtgggttatcgctatgtaaatacacagtttgagcatgcagtacttgcatacatcccagtagggctaatacaacccatgttttttttacgtttttcatattatagtcttttcatatttatcaatcatctatttctctttttgcacctgaaaactaaacaaggtgcaatgctcataagctttctccggtaacaccaggcaagaaggaaaatccgaatgagaaggagtatccggataaaattgtgtttccaaacagatggctgtatccggtcggtcataatatcccgctgtatacaaaagaacagcaggcaaatcagtcatcactgtcatttttcttcctgtaacaggttcatataaagaagcagcctctaacatctcctcagacattttatctttcaatatatagcaatgattatatcctttattccaaagtaattgctcatgatcagcatataagtctgcacctaccggttttagggaagtaaagtcaaacggagtatttttcaccttcatctttcttcccgtaggaatgaacgccgaggtagtatccaatatccggtcagacgaaatatgcaaccgatgctctgttatcttttttccatttccgcgcaaattgaaatatgcgtgattagtcatattgatgtaagtagcacagtctgtttccgcataatgccgtacagaaagttcattgtcctcattgaaacgatagtctgttatcacatggatatttcccgggaaacctccttctccgtctggcgaatacagactaaaacggatgccatccggtaattcttcccattgccacaccttgttatgaaagccggaaaaacctccatgattggtattattcccatcattaacttccaaatggaaggttttcctatctattgtaaaagaagcatcagcaatacgattggcaaatctgccaacagttgctcccatataataagaatctttcaaataatcggacaaggtatcataaccgatcaaaatattggctaatgctccctgaacatcgggtactgaagctgtaatccaacgtgccccccaattagtgaattccatataagctcccgaggagttcattacggtaaatcgtaatacaggttttccgtcagaggtataagtttctattttatgtattattttcatattattccaaatttcagaaaaagaaaaagcatcaggtaggaagcagatgtttcctcctgatgcttctaatttatatggatagaaacaatttatttgctatatcccggattctgatcttcagggccgaatgcatcatttgttttaatttcagtatcaggaataggatagcgcttatggaaatcttgaattgtccctgattcttttgcccaacggttacgttcttttatcaattctacaaatttattagtacgaagcaaatcaatacgtctccaaccttcgaaacaaagttcacgcaaacgttcatccattactttatcacggaattcatctttgctcattcccgaattccatttcttatcttctggcaagtttcctccccatgcacgagtacgaatttgattattcacgatctgtactgcttccgaagtctgtcctaattcattcagacattcagcatgcaataataatatatcagcataacgaatcattgaaaagttcttaccagaattccacatgttattaatgccaagccctgaaagaatatctgtacgatagtcttcatatttctttatatgcggttccaattcatctgtagttcccgtccattgagtctttgacaaatcaggagttacatattcaaatgttccatcttctgaatatttattagtataatacgtaaaatcataacgcaatgcttcttctttacgcaaatctccatcttcccaaatgccaccttcttctaccgtcttataagcaaaaggagtcggaactagaaagtcgtaaccagagaaagagcatccctgaccaaaccaagagtcacatgcacgagaaccacaatcaaactcccaataattacaatcaggatatacattattaaattgcaactcaaacaatgactcttttgtattaggattatcataacgatacaagtcagcataattattcagcaattcatatcgccccatattaataatagtcttaaaacattcatcagccttggcaaaatcccgtaatcctgtctcttccggagctgccatataagcctttcctaacatggcccatgcagccccaacagtagcacgctgcggttcactattataagactcaggcaaattattggtagcagtaataaaatcattaataatatattcccatacagtctttaaaggttgacgtcccaagcccaattcatcagtacggttcatatctatcacagggatttcaccccaatacatacttaattcaaacattaataaaccacgaataaagcatgcctctcccatcaactgtttagcacgttccggttcttcagtggtcatacccaatgcatatatagctttagcagctgaaacgacagccggccaacggttgttccaaatagaactaacctgagtagatgtaggattcaactgtccattatatttatccataccggcttgatcgcctgaagaaatcaactgataattaccctgctgtgtttcatctgtccccaaataaggcatcaatccattacgtccttctttacagcccctataactcttatacaatccaagaactaaaggttctacattatctattttttcaaatacttgttcttcagtcaaagatcccgtaggttctacctgcaaaaaatccgagcaagaggaggttttcagtgcaaaggtcaaagccaaagcatatatcgcactatatctatatatctttttcattgttgtgttttcttttaaagttagactatttattctatccttccattaaaaagccaaattaagaccaaaagtatacatacgtgtaggaggataccaatcaccagtttccggatcataaccattataattagttaagcctcaaatccgcaactacgcgcctaatatgatacagaagcgaaaagaatctgcatcgttagtaaaaagggggcacagtgcatcgaatgtcaccataaagacatataaatgccccttaccccaccatgcgacttgaggcaatacgcaaaatcacgactataagttgtcggtgttatccaaagtcattctggaacacattggcataagcattgttgcatgaatagatattcagcacatacttccttgatgtcctgacccatttggctggcacagagatgaacttaaagacaaacgtcttgatgcggcttgttgctttgagtccgaacctcttcacgtcaagcctcgccatgatgaatttatagaagttgcgtatgagtgccataagcagaagaaacaccgtgttttctcccataaaggattttggaagcctgttccagccgaatccgttattcatatcatcgaagatgcgttccttccctccacggaggttatagaattcgacaatctctttctcggaagactcgtagtcatttgtaaggatgcagcggtaggtgtattctccttcccacaggtcgagttcgccgtctatccgcttctgtctttgaatcacaagacggtatgccttccctttccatttctcgatgagaatggaggccagctcaaactcaatgccgcccaattccactttcttccaacctctgagggcaaagatgtcattgtagagcgaactgcatcggttagcacggatatagaaggtcttgcagtgtttagcaatctcttccactatctcttcagaacacgagccgcaatcagctctgaaacggttgataataagcttgttttgttcaaacctttcaaagaacctcttcagcgtgtccttctggtggaaacggacatttgtgttgccgtcgctgttctcaatgccgacaatcaagttgccaataaccgccacgccagggcgataaccaaggaacttcttgtatgtaggcttcgcatcaaacttctcagcctctatgaactggtggtcgaagtcaacgtcatacccctcgccctctttcagctgccctgtggacaataggcaattgaggagcagtgtattcagcttgtctgccgtgttgaagtcgtaggtcttgccagtgtcggatgtgtaggaaatgttatcctgggtcagttcctttatggctctaagaatcgtgtcggcactgcatgtgcgaagtgtcggatgaagcgaaaggtggtacatcagatgagtggtgacatcctcgatgcatgagccgccacaaaaataaacgctcataagcgaacggatgatttcgctgtattgataaccatacagcctgcatctcataccgagggttgagtcgattacagatgagagtctggagtcaaattgctccattattgaaaatattcctccaaaaggagtgagtttctcggatttaattgctacctttgccatgtctgtcgggtttgatacatattttgatttgcaacactaagataggtgaaaaatctgacatggcaaattcctgagcaactttttgttgctcaggtacttaaaaagttatatttgtaatagtgttgcggaattaaggttaagcaaaaaagattagaaccagtggcataaacacgcaagttagccagtttcagagcatttatcactttagttgggaaagtataggccaatgtcagagcagacaaacgcaagaaagaagctttctgtacactaaaatccatagaacttgcaccataatgattataatcaaagccagccaacacacgtggaaattcagcatctgtattttcaggagtccaacgatccaacaaatccgttgatgcgactccagatccagtacttccaatcaaagtttcataccaaggactcaattttttagccccataagaataactgaatactgcatttaaagacaatcccttccaagaaaaatctgtagaaaaaccgccataaaacttaggatcagtggaaccaattacaacacggtcgttttgatctatctgtccattattatcataatccaacggatacaaatcaccaggattcacattatatccattccaatttattttattcaaacgatccatatcaatttcttgggcgattccacctgttttccaaatataaattgtgttacgagactcaccaaggaataaattaccttctttttgaatattacgatcactatctacattatatacaacatcattatcaccatataattgagttaccttatttttatccatagacaatgtagctgcaaaattccattcaaaatctttagctcttaccaaattggcattcaaagcaaattccaaacctttgttttcaatcgcacctatattttcaatagtactgctgaaaccagtagtcgtaggcaacgaatggctcattaacaaatccttattttttatcaagaaagcatcaacagacaaacgcactctattctgtaagaaagccatatctactcctaaattccattgtttttgtttctcccaactaatatctggagtaccacgtcgcccattggaaacaaaagaattcgtataacctgtatcggaagtacccgtatagctgacattatataaagataaataggcaaaatcatcaatattctgattaccaacgataccaaaaccagcacgtaactttaactgatcaaaaatcgtctgatttttcatgaacttttcttctgtaatattccaagctgcagacacagacggaaaaataccccactgatttcctttagcaaatttagaagaaccgtcgtaacgcgctgtcgccgtcaataaatatttacccgcatagttatagttaacacgagcgatataagataataatgtttgctcggaccaagctgtacttaagccgcgctgatcttttttataaccagatcccaaactatgatatccaaataaattagtgccaaaccctgttgccgtagcattaatataattatacatagtccgtgtagcactggtaccaaccatcgcattcaacttatgtttaccgaaagaggcttcataagacaatgaattatcccattgccatacagtacgtgtatctctatcatctttggcttcaccttgtgttccataacgttccgactcataaatatcattcggggtatatttattttgctgcttttgagcataatcaatagagaaagtagaacgcaagtttaatccttcaataagattgatattaatataattagagctcaacaagcgattatacaccaaatcattatcgactttcaaagaacgtaatggattaaaattattttggtcaaaaataccttgccaatttaaagtttcaatctcatcagaaatttccaacatcggattagcacaacgtgcacgattcattactccatcatcaaccaacgtgttctcggtacgtgtaaaagttgtattagtacctactttcagccaggatttaatctgttgatccgcattaatacgtcctgtgtatttttcttgttcagacttctcaattacacctttattgtctgtataaccaaaactaatataataagaacctttatcattgccattcgaaagacttactacatgattgtgttgtactccagtacggctcacagcatccagccaatcataatttttattattgttgtaggcatcgaattcataatcagcaaaaacagtattcgatcccattatcacatcattgatataagcattgacatctccatcaggatttgtttgcatataaccattcgtataggcctcctttctaagttcaaataattgacgagtattcatagtttttggagtattagcataggtctgaaagccaatccagccatcataagaaactttaccttcgccttttttacccttcttagttgtaataacaacaacaccgttggaaccacgtgaaccatacagagctgtagctgatgcatctttcaagacctcaatagaagccacatcattcaaattgactgcattaaatccagagaatgaattatccataaccataccatctacgacataaatagggtctgtagatccattaattgtattaataccacgaattttaatagatgcatcatccgtaggacgcgtaggttgagaaatgaacacacctgcgacacgaccttgaagagcttgatttacatttgttactggtttttcttccaatactttagaactaacactggcaacagctcccgtcaaatcactcttcttcatcgcagtgcctacaacaaccacttcatctaatgtttcagtatcctccgacatcacaactttgactggttggttacccattattttaacatcttgtgcaacatatcctatataagaaatatgcaatgtttcccctttctgaactgataatgtaaatttaccatcaaaattggtaatagtcccattggctgtaccttttaccactacacttgcaccaatgataggttcggatgtaacatccaccacctgtcctgtaaccgttatgttctgtgctagcatattgcagcaacaaaacatgataaggattaaattaataagcctaattcttttcataatttgtaaatttaagtacgatttaaagtttatattggtttattcttccactttgaaaattacaacatcacatgcaggaaccgttacttccagattggttttagcagtactttcaatgccactccataattctttcagcctatattcctttgacgaatccaaccccagacgctctaaagctgtagtcatcttcaactcttgatccatatagttgaacacagcataataagccttaccatccttatccatgcgtacaaactgattttctgacttttcaccattcccatctacaggatggaaagattccccattggctatagcattgatctcagcattagtcagatatttcatcgccttctccttcacttctttagaaccgcctttgctgaaatcatctccagcaatgaaaattcctgtaatgacccccgaagtaacacgcgctctgttctcaccatctgtagcatcacgcaatacaatatggtcaggatcattaaactgataaaccttatcctgccaccaaccgtatgaaagtgcattcaaggtatattcagtatccttcatcttattccacgcatcacaagcaattcttctagactgagcataatgagcaggaaaaacaggagaaatagaaagattgatatacatatcgccaaaatatttgtcaagcaattgcattccatagttatatccctgaatacctgtttgtatttccggattataccatttgtcagcctccatcgccccatgtgtcataaaatccattttcacatattcaaaacctgcccgatgaaagagttccgatgtacgcttcatcatagcttcaatagctggatgggtaggatcaacagcatacgctccgtctaattcctgcggttttccatttgcatagagatacacatctttatatttataccccggaatttcttttatttcacgttcaggatttttagcccaatcagtaaacggagtccaataaacgccggctatctgaccgtttgccttacatctatccacaaaagctttcaactcctcttctgaaaaactattccaaccagaatccaaacctgtataaaccagattatccgaattcacaaaatgatgggactgcaaattctctttataaaaatcagaaacttccaatgctttcggataggtcagattaaattgcaacgctccccagctgttccagccaaaaggaacagctttatcccaagctttgggcggagcaatcacagcattagcctgagcgtattcttccatgccttcacgccagtcttcaaaaaatcctactaaaatcttaggcgacttgattgtcgtacctttcaatgcaccgtgaggtttcgaatcacgcgttgtcttatcagcaacacccccataacataccaatgaacctacattatatatattacctttacctattgttatacctgttttccaagaatcgtgttccacagaacctatcaccatagcttcacgatcatcattattaaatatggcagtaacttcataactagtcaattctgtaaatgtgagcggatgagattggtatctgatccaacagtcattatcgaaaggaatgaaaagcgcacgattattttcaccctggttcaggacttcaggcattcggtccacattgaccggcgccatataattcgaagccatttcagacgtactttccaaagtaaaatctgtcaacacataatcctttgtcggatatacataaaaagattgaaccagtacaggcaaattattcccagtataagtcacctcataatgatacccttctccaaaatgatcattgattttttttgtagaaacatgatgctttgcataatcacgagtcgaaacaacactgtcggccaatttataagctgcatatacattatcataaataagcttagagcctttgctgatatcaataccattagcgtgagcatcgtactccaaagaccattcaccgacatttagatttgcattttcagtacacccggacaaaataagaccggaaacactcaatgcagaaacacagagaaacaatgattttaaagttaaccaattattcttcataatattattagtttgtcaaagagataaatctacttaaggtttgctttactgttcggaattcttttcctttcaagcatggtcaaaagtaggcatatcttgacaacctgttaatatacaaacgcagcaataaataggatttttgcagcaatgactcatctgcgtccgaagaatccgcaaatgtgtcattttttgctgcatttctttcaatcagagattctccgtcaaatctattttagctttttccttggatgtttgatactgtttctcaaactctttcggagtcattccgaattgtttcaggaataatttactgaaataagatgaagagtttattcctaccatataacagatatccccaatacggtatttaccttcctgaatcaattcggccgcttttttcaaacggatcaaccgaatgaaatctatgggtgaaagattaaacagaatctttattttcctcaataagctggaacggctcatacataagatatcagccatacgttccacattgaaattttcatctgaaatattctcttgaattacattaattactttattcataaattcttcatccgccttgttcatctgcatattatgcacaggaaaaaaaggacgtttagagaatgcctcacgttcttttctacgattgctgagtaaagacaaaatctgactcttcaaataattgaaagaaaaaggtttctccacataagcttccgctcctatcttcaatccgttaattttactctccaaatcattcttggcggtaaggaaaataaccggaatatgacacaaatcaatatccccctttatttccttacataattcatagccattcatcaccggcatcattatatcactgattaccaaatctatgtgattactacgtaaaacatccaacgcttcctgtccattcacagcagtttccaccgtaaacaaaacttccaatcgttcaaagataaaagatctcatactttcattgtcctctactaacaataaagtataacctttcatctggtctgtttctgttgatgtttcctcatccaatacttctatattttgctccactaccttctctatttgctgccttacttcctctttattcaaaggaatgatcaaaacaaatgtattctccggttgttctatatccaaataaagcctgcctttatgtaaagtggctagcgaacgagctaaaggtaatcctatgcctactcccatccgaactgtatccttcttctccatctgataaaagggttcaaaaatctgttggctggacgcttcaggtatcttttctccgtcactgacaatacgaactgtaaaatcagcttcatcttggaataaatctatcgtaatggtatgacgggcatatttcaaagcattattcaacaaattactcaatacttttgtgatagcctccttatctatggcagccataattctttcttggggaatatgctgcaataactctttctgcttttgcagaatagtaggctcaaaacgagcaatcgtttcattcagcaatgccgttacatcaaccgtttcaaatttcagttcaaatttgctcgcccctattttctgaaaatcaagcaactgtccagtcaaatctaataatctcttggtattctgcccgattactttcaaattcttattcaatttctgatccttgatatccatttcctcaattgcttccaacggaccatttatcaatgtcaagggcgtgcgcacctcatgagctatttcagtaaagaaactgacttttgattcatagagttctttctccttctcaatttcaaataacttctgcttttcttccatctgtttctctttgcgtcttctataccaaaagaaccagcaaagtacgacacagattccccatataatatacagaaaataagcccagacggactgccaccaaggaggcagaataacaatggataaagaccgggtagcataagggccttctttggcactattggtagcccgcacttgcaagatataatctcccggaggcagtttagcgtaagaaatattctgattactcgctgcccgtatccagtctttgtccaacggaactaatttataataatactgattggactccgtagtagaataacttaataaagcaacatcgaaactaatatttgcctgatcataaggtaatataatttcatctgtatgttctatacactttttcaaaggagaattaggagtgtgaactgttatttcctgattataaatgctgaactttgaaatataaacaggtggtaagaaatttattttctctgaagagttaggatcaaatgcaatcaatccgtctataccaccaaaataaaacttaccgtcctcacccttcaaagctgacttataattaaactgattccctaatagaccatctttagtggtatacacccgtatatcttttgattccggattaaatctaaccagtccacgatttgttccaaaccataaatttgattgttcatcttccaagatcttataagccacatcatctggtaaaccgtctttgatagaaaaagtagtaaaatcatccgtttgagaattataacaacaaataccaccacgatccgtagaaatccaaatacggcctttacaatcctgcatgacagaactcacagaattagagctcaatgtattttccttaccttcctcatgagtatactttttaaaaagattcttatggggatcatacttccataacccacttcccatggaggcgaaccacatcattccatctttatcttgaaatacatcaaaaatccaatcaaatcccacttcttccactttgtcaaaatgaaaacttgtaggagcagctttataaagtccccagcctgtaccaatccacttatatccttcattatctataaaaaaagtataaacacttccttctcctatatttaactcctcaggagtataatgacaaactttattctcgggtaattgaatcacatccaatccttgcttaaacaagccacagaacaattggcttcctttgacaaacattcccaaagtaaccatatagttccctttatcataatcgttcaatctcaaccgccttacctttccggaagcaatatttaatatgttcaccccatcatcttcagtgccaatccatatgttacccttattatcagaagctatctctcttacccgtttcgttgttaatgagttcccatcactcccaggtacatatttatcaaacaataaatcatgatgaggcagataatccaccccgccaaacatggttcccagccaaattcccccttcccgatctcggtaaatagtataaataatcttatctgacaaactgaacggacgcatcagatcttgcttcaaatgaactattttattcttcctctcatttacaacaaacaaaccttcgtgagttcccacccatagttcattgtcaaaacaggctacattacgtacaaatgtatggttagcctccggtatatctatttttaccagctgattcgtaccgggattatatttcattagttccccttcatgaatagccattgcaatccaatcaccataattacaaataaaattaatattctttccctttaacgaacgcccggttttatcaacacaatattgttcaaatttatccgtatttctatcatatcgaaaaagtccgactccccatgtaccaacccaaacatcaccatcagggcgtaccaaaatacaatccggagcttctgttttaaaatgctctttgttggttacttcataaaaataaagcttctcatccttatagcgaaaaactccctgatcaggaattacaatccaaatattcccaatagaatccgccacaatattagatacccaattattcatattcaccccttcttctgtttccatattcattgccgtgaatatatccaaggcaggattataacgatagactcctctatccgttcctacccataactgacgttccttatcttcaaacaaagcagaaatattatggtttcccgtaccggctacatagtcatcacagttcatctgtacaatagaagttccatcaaaacggttcaaaccattttttgtaccaaaccacataaacccgtaactatcctgaatgatagccttcacattactttgtgatagtccattctcacccgttatatgagaaaaataaaaattggacaatcccctatcaactgcctgtaatgtaaatacaacatacaaacaacataaaatgagcaaagtctttttcatagcttgttcaaaatttgagtcaaagataaaagaaaaaaaggataaataatgccaatataaaagaaatagaggggcaaccctctatttcttttcacgaatgactattacaaatcccccaccagaagccataaacatttcaataatattcttattatctatatccattattttatgttcgtataaattagcattcttgttacttctttttttatcctgaaaaatttcaatggtatatttcttatcctgaggcaggaaagagcaatccacctgaattgttctctctccccaagcattcaatccgcctatataccaagtatttcctttctgcttggccaacacggcatattcgcccacacgggcagctaagggaatcgtctgatcccatgaagtcggtacttccgctaaatactttaaaatatcaggatacttacgatactcatccggagaatcacataaactggcaaatggtgcggaaagtacaacaaacaaggccaattcatgtgaacgagtccccaatgaactaggcaaccccggatcgatcggcttaaatttctccaatgtgctgttacgcatcgaacccggagtataatcaattccacctcccagcatacgggcaaagatacattgaagctgataatccggattagaagtggtatcccacttaaaacattccgcacatcgcatggcttcataagaaaggatattaggatatgcccgatgaagtccggtaggcttgctgcatccatgaaaatccaccataagatgccgctcagcacaagcctttgccagattttcatattgagggattatttgggcatcatcacgatcaaaaaaatctatttttaccccaacagcaccccatttgctgatagaatccaaataacaatgcggatgttggaataaagtagcagcaacagtccaaagccatacacctacttttttttcttttccatagcgtatcacctcttttatatcaatattcttattcaaatcagcatgattaaaaacattgctccaaccggcatcgaccagcagataaggtatcttgttttcggaagcgaaatcaatataatacttgtacatctgcgtcgaaaggttttgatgaccggaagggaaaggagctttttccaaaatagcacaatgccaccattcccaagttgctttaccaggacgaatccaatccgtatcctttatttgttggggcttggccagtaagtaaatcatttcattagtcagtagttccttatcatccttggctacaatagctatacgccaagggaaagcatgattaccagcagtacgtgctaaataattctccctctctttaactaccgtaataaaatttccccaactgcccatctctatttttttaggataggccgcccaataacctttcatcttgccatcttccttacgaagatacatacccggatagttattcaaatctgattcagccaccacaacacgcacattctgcatcttgtttgtaaataaagttggtgtaataccatatttatgttcttctattttagaaatgccctcgtaaagcacattgctcaactcccaagctgtaaaattagttgtttcgggtaaaataactgccggatcatcgcccagattaaaagaagcttcttcatcagctacaatcaaagaatcctgctccggaagatttccacaaaaacgatatgccattccttcattatacatccggaatataactgaataaccatccttgaatttcaaagaaagttcattataatggtctgttaattcacgatagttaccagctaccggataaaccttctcggaagtactccttgtagaagttcctaccacttcaccattctttccccatatatttccattttccatcgtcatacaaatagcagagggatgaatgacaggcttaccttccaaacttaaagaatattgtaatacccttccattctctatagtaagtgccaattgcccgtttggggatgataattcataagctgacggtgtttgtgcctgtgcaaaaacgcacagacaccatgttaccaacaaaaggaaaatattcttttttttcatacggcacacaagttacgatggatttgtccaccttgatgattaatatccaattctcgcaccttatccaaaaaatcaatggcttttcccatttcacgcaatcctaaacaacccagtcccatcacataattgcaatgaatgcggttacgtttatccaagtcatcttcccaaatagccaaatcaggcagagaaacagcaaaataatcaatccggcagtggtcaaataaatgcttttcaccatgctttatcaatttgttaaagcaaccgcacgccttgtcttccctgcccaatgcacgccatgccaaaccttgatagaaaatcttgtcgggctgttggtcattgtaaaagaaagcctgttgtggttctgacgagccaatggttgctttggtgaagcaatctatagcttgttgctcatttcccaatccacgaagcgcctcacctttataataccagatatcattctcttcagcatttgccaattttccctcacccaaattaaatggataaacattcgtttcatccaaaaggactaaagcatcggcataacgtttttcacttaaagcaatctttgctaattctatacggcacaatacatattgtccggtgatttttccttctcctccttcccatggatggaaattacgtgcggcaatcaattcttttgcttcagtatagcgccctagttgattatacaaagtgatacgctcaatggacagatcatcacgctgttccacttcagacagatgtgcttccaaaaaagccaaacgttctgtatgaggtcggcctaaacgtttataaagttggtccaactccattaatatacgagaatcgtgctcatccaatgcataagctttttccagagtttccaaagccctttgtttatcattacgcttattataataagctaaagataaattacgccatacggtagggaatgttggctctatagcagccgaatgttcccaacaagcaatagcattatcatactgacggttagcataccaaaagtttcctaaactatatgccgcttttgctccatgaatattcaaacgtacggcatcttgaagaatcaatacttcttctatacgattcgggaaacaatatgaatgattttccttttctgctcgctgataatattccaatgctttactctcatctcccttacaggtatggaaataccccattgtataataaacgacaggatatacttctgtaactccggttacgtagcattccaacaaagaaagagcttcctcgtacagtccggcagcagcaaaatccaatgcatattctatatatccgtgagcccagccacgcatcaactttttcatttcctccaacacttccacatcccgggtcaacaaataatgttcaaaacggcatcccatattaaaacgatctatctgcaatgattcggctacgagcgccaaagcttcctctttacgacccaatttgcgtagaatggaaattttcaactgacgcgctttgtgattatgccaattacgaatcaatgaacggtctatcttgtccaaagcactttcatactttcctttacgagtgtcaagttgtgctagtgcataataagctgcatcctgccaagcagcattccatgccgacttaaagaaagcatcataagcctcatcccatttctgttgcatcatacaactccaaccccaattataataaggttcaccgtcataaggattcggattacgttcagtcaaggtttccaccgctttccggaaatagctctccgccattgcaaattgtcctttacgcatcaacaataaccctaccgcattgttacaacgtacatctcccggttcacgtcttaatgcttccatataataatccatcggattataagtagcatggcgatattgttccaaatgtagtccggtcaaaaacagttgttcgacagaagcaatatcttgaggatctttagcagctttagcaggatcaggaaccggcttgatttccggcttatccgcttgataagaaagcaaaatttgtccttccttatcacgaacctctacacatacctcctcttcttttagtccttctgccgcaaaagtcgtaataaacggttctgatggcgaaatttgtgtagtcttatccaataaaacagtgcctttaatagcttttactataatacgtactccactattcactcccgtagtataaagcaccaaacgggctttaccttcctttatttccaaattcagcaaagcatctttagttgcattctttacataacccacttcactataaggcataaaatactgtacccatgatttttcctcatagggctgtaaccaagtaaagtccggttggttatccgtatacataccggtcatcagctcaatgtaaggtccatcctcatcggtcagattgcgatcccacgccttaccgaaatcaccattcccccatgtccattgtttctttcccggagaaacatgatgatcggccacatgcagcagaccgccatgggcatcttcttcataaccacctacaaaatcatatttagacttgatagccatatatgatgtaggaaccggaatatttttatatttagagatatccaccccagcagaataatcctgtttataataaactcctgtagcaataggaaaagaagaaacatcgcgcttgccatgatcgaacaccgcattcacatcaggtggaaataccgaatgataatggtcattgactactactgcaggattggcccaccacaaaaaagtctgagggaaagacgtacgattataaatcttcacttttatttctatataagctttgcccggataaagcgtaaatccctgcatacctttggtgcggaacattctctccacttcattgcaccatactgtcttactgccatccgcattttcctctatcaaaaaatcagtaggcaaaaaagtagaaggacggtgatgctgaggccagttaaattcgatgcctccagaaatccaaggtcctgtcaatcccaccaatgccggtttcactacttggttgtaataaacaaaatgacgttttttcaccttatcataagccatgtgtatacgaccacccagctcgggaagtatcatcaccttgatgtattcattctcgataaacaatgcatgatacctcttgtctgcttttttatctgaaatcttctctaccaccggataaggatagactgatccggaacttccctgataaacccttttttcaagaaaaataggattcttctcttcctttcctatctcataagtaggaagcatgatatcttcctcccatgcacgcacctcactgccatgaacggtactttgaattaaatattgagttattttctccataataaatattgttatttcactaattctttttcaatttcttccaagctcttccctttggtttccggcaaacggaacacaacaaatattcctccagccaggcaaatcaatccatacaaccagaatgttccggcagctcccaaaccactattcagcattgggaaagtataggtaagtataaaacaagccgcccacaaagcgaaagtgcaaacagacatagcaactccacgaatacgattcgggaaaatctctgagataatgacccacatcactgtagccaaagtcatggcataacaagcaatggccatcacgacaataatcaatagaacaactcctgtgatatgaaaataataagcggctcccataaaggtataaattactgccaagccaaatgatccgatcaatgtcaatgccttacgtccccagtggtctaccacaaacatagctagaatagtaaatatgacattcgtaataccggtcaccacaatattcatcaaaacatcagacacgccataacctgctgccataaatatttcctgtgcatagttaaaaataacattaatgccacaccattgctgcaaaatagccataacaacacctatagtcaacactttatacatagcaggatttaataattgacggtagcctccttcttgcgtctggcaggctgaagcagcttctatagcagccaactcagtaacagcatattcctttcctcccatacgagtaaaaaccttgagtgccgcctcccgttttcccgaagaggctaaccaacgaggactttccggtaatataaaactaaaaacaaagaacaaggcggccgggacagtcattgcccaaaacatccagcgccatcccatctgtccgttccatgattcacggatcatttcatgagtagctcctaatgccacaggctcagctatctgccaatttacaatctgagaagtcaagatacctaatactaccgtcaactgattgatggacacaaaccgtccacgcagatgcgccggagcaatttctgctatatacataggtgacaaactagaagcaatccctatagcaaagccccctaccaaacgaaatacattaaagaaagtaaaagaatgaacagcccctgtaccgacagccgtacagataaacagtcctgccgccaaaatcaaaatcggcttacgtcccaaacggtcactcagcttaccggcacttagtgccccaaacaaacagccaatcaaggcactgctcattgcccacccctgcatgacaggatcatttgctataccaaagtattgttcataaaaaggttttgctcctccgattaccacccagtcatatccaaacaggaaacctcccatagcagaaatcaaagcgataagaaatagataaaaattagattgtgttttcatgaatatcatatattagttagttttataatgcaaagtaacaaggattcaaggacttaaagaatagaaaaaattactgagaacatggacaatattactatttcatcactttgcaggttgtcttatcataaaacgaggactacacctcaatatactaagatgtaatcctcaatcaagctatgcaaagtagcctgtttttttacaataactccagcaaatctccacgtttcatatccaccgttattaaaccctttgcatcaggatttgcaattgcctccttaccatttaaaagcactctatattttttcccttgaggaattttcacttttaaaacctgatcagcagtagcttttaaagaagctttattgatgacagcattcgtccattcagcagttgcttcagctcctccctttaaacacagacctttaaaactaccatctttccattcaacaggcaaacagggtaagaattctacataaccctcatgattctgtatgagcatttctgccataccagctgtaccggcgggattcccatcaaacgaataaatatcaccttccgcaccagcaatgccaccaggagatacagtcattaaattttcacgtgaaagcttgccctgtaacaattggacactcttatatgcttcctgcgcatctttcaaccgagcatacatacaaatcatattggcacggctccattctgtatcttcccagttttcggcagacaaacgattctcgatagtcttacgggcagcttccgccaattcgggagtcttctccaaagtgatctgggaaaaaggatacaaagctagcagatgggaagtatgacgatgattgggatgcgcttcttcaaaatcttcaaaccactcacggatagcaccattggcacgtaactggataggaggaagctgagcgatagcggtacgcaggctatcggcaaactcacggtctgtatctaatatttctgaagcccggacacaattcgacaagatctcgtaggccagttcacggtcacaggcaggcatcatggaagcaaccatttcttcaccacctgctgtacggaaccagttttcgggtgagatgctcggtcctgtcatcagataaccactcttcgggtcttttgccaagaaatccaaaatgaactgtgcattacctttcaaaagcggataggcagtttcggccaggtattgcttatcttgtgtaaattcgtattgtgtccaaagatgagaagcaatccatgagcctgccataggaaacagtccccaaataatcgtgctggatgcgggagtatatccccatacattagcggtggtatgggcagtccagcctttacatccgtagaccacttcagcagtcttcgcaccgtgatgagctaaatcctttatataggtaaagaggggggcattacattcggcaagattaccgacattggctgcccaataattctgttcagtattgatatccaaatgataatcattcgtccaccccatattacaagccttgttatcattaaagaaaccttgcaaagctatgggcaggggagagttctcgcgcgaactggcaatggtaagataacgaccatactggaagaacaaggcatccagtccggtatcggtcttgccttccttcacttgtttccaacggacatccgtaggcatcgcccggttagcgtcttgcccgaaatggatagaaacacgattgtacaacgtattataatcctttatatgcgcctgcttcaattcatcataagatttagctgcagccttctccacaccgtcagcacaaagagtcttgtaatcaggacttttataatcagtacgcacatcgacaatcaaagtcacggcatcagcttctttgatacttaccccagactgttccatctttacctctccgttatcggccaaaacggctattcttccttcaaaacagactccgcccggaccatgcaaaggaaaatctacttttccggtaaacaccaattggttattttctacagaaagatcagcttgacgcatcaaatccaatcccatgttcatagtaatggacttttgcttatcagcggtcaagcggagtacgagaacattatccgggtttgtagcaaaatactcacgtttatagttcacaccaccggagttgaaagaaacgctgctgacagcctcatccaagcttaacgaacggcggtagtcggtcactttaccttcggggtaaatgaattgcatcttcaaatctccaatgggaagatgagttccgaaagaagtctggttgccatgaagattatctccggctatacggtttccttccgatagttttccctcaaaaaacaactttctgagctggttcattttctcccgtccgaaaggtttgttctggttctcattgtactggccggaccacattgtcgattcattcaatgccagtttctcttcctctattccaccataagtcatagctcccaaacgcccattaccgataggtaaagattccatccaaacttttgccggttgggcataccacaattctgtagtttcacaggaatcagttgcactctggcatccggaaagggccaaagccattgctgctaaataagtcttaaaatgtttcatatttttcatgattaatagtttcttctgaaacaaaagtagatatacctctcccattaggtagagaaaaactcgccatttttagactcttttgcttcaatcgtaacctataaaagggagttattcaacatttagaaatctttcccggcacaaattccaacacttcaccatttgttatcattttcccggtgaggcagtcataacaaactccaatattccgcccttcatgatatcctgatgagtaatataattcttcgtatatttttcaccattcagtttcatggaacagatataaacctcattgtcctccttacgcggagcttttaccgtaaaagtctttctaccgggtaactgaatgacagcttcttccaacataggagtaccaataacgtactccccacttaccggatttaccggataaaagccaagtgctccaaacacataccaagcagacatctctccacaatcatcatttccggcataacctgaagaagaatcgttatacagttcattcatgatatacgccacgtatttctgtgttttccaaggttcccccgcacaagcatacagataagccacatgatgactcggttcattaccatgcgcatactgtcctacaaaaccggaagcattgtcattcaatgcaccactttggtagctaaccgtaaagaatgtatccaactttgcgacaaaggctttgttcccccctgtcagtgaaatcaaatcggggatattctggggtacataccaaaagtattgccaagcattcccttcagtaaaaggataacctccattcgccccatacttataagggtcaaatggctcaatccactcacccttatcattcttaggctggaagaacccggttttagaattgaacaaattccgatagaaagcagatcgtttcataaaatgattataatccttttcttttcccaatcgcttagccaactgtgcgacacaccaatcatcaaaagcctgctccaaagtaatagaaacagattgtgtctgaatattctccggcatatatccatatttctcccatacttcaaaaggagagttcggatgagacacgatagaactattaaaaaccgcttcataggctttctcttcatccaccccggcaacacccttcagaacagcatccacaatgacaggaatggagtggttgccaatcatacaataattatcctgtccccataattgccatacaggcaaatagccataataatcgtattgcctcatcatgctcttaacaaaatcgggaatgcggtgcgtgtgtatcaaagtataaagtggatgggcggccctgaaagtatcccataaagaaaaagtagaataatgcacctccccttttgccacagaacgagtgacgtaatcggatgccatatattcaccattaacatcactcatcgtattgggttgtaccatagtgtgatataaagccgtataaaaaatctttttctgcaaatcggtaccttgaatgataatcttcttcaattctttctcccaactagtttcggcagcacgagcaatatattcaaagtcccatccggggacctcagttgccatattcaaccgggcattttcaatggaaaccggagataaagcgactttacatatcaattttttattccacttcttatcgaagcaaaacaatccacgcagttccgtaccattaatgacaggagtattctcatacatccgattgccatcatataactgattggataggatcggttgggaaaattcaagatgaaaataaatctttctcagctttgcccatcccgtaataatacgatatccctctactacggtaggagaaaccatgcggagttgtgattgaataatccggcggttccaactccccttatttgccgagtggtccaaatccaaccataatttcaactggtcaccatcagaacaggtatagcgatgcactcctacgtgtacagaagccgtcaactccgcttgaatcttctcatctttcaataatacctgataatagcccggacgcgcctgttcgtgttgatgagtgaaagtcgatttccttttatcactgatggtagggaatagaagtatatctataaaatcagaagcaccggttccgcttaaacgcgtatgactgaaaccataaataatagaatcattataatcatatcctgaagcttgcgcccaatcaggagcttcacgagtgtcgggactcaactgcaccataccaaaaggaacagtagctcccggataattattcccagaaagactagattgaacagcaccggttccaataaacggattaacccaacgagtaagattctgggcgctaatacaatttacagaaagaataaaagcagccaataaattaacaagtcttttcatcatagatttaagtttcatttattggcaaaattagtatatccacgctccccaaacagataaattttcgtctattttagcttcatttgcttcataaagtccggtttcttagcctcatcaccacaaaatattacaattatcccgttttattccaattcatttaccgccaacaaggactactctaacattttccaaataaaacttataaattcaggaatgttaccccaattatcatatttttttcacctatttttctatatttgtgcattattccatcacacaaacgtaaagacaaatggaccaaaccttgctaaaatactggaaagcctgccttcaagatgcagaacgcaaagccattgctcccaaaggagcacgaatcaccttaaacatcggtgataaaatacttaaattcgttcctctcaaaagtattcctgttattttccctgattggaaagcagaagatagcaatgaaaaacaaaaagtaatgattgctccttgtattcttttgcccgaatttgaaaacggctggacttcccaatcagaaagaccggaatatccctttttgattactgccaccatgttgcctgacggtaaactaaccgtatgcgagaacgaatcagacagaattccaatctttattcgtaaatttttggaacccaatgcagccaatgaccgcaccataacctctcttccaaaagtagaccgactactatccgatttcaatacagaaattacagaatgggaaacctattggcgagcatgcgaacagcttttcaaaaaagcaaccggcaaaactttcagaacgatgaattaccatgataatccagaaatcattatcataaaagcctccgaacgtaatatggcacagcccataatcacactatatgacaagctcttaaaagataacgataccactccgcatcctttgttgaatttattgatacagaccaaaccaaccaacgttcttcccagtccaaccacccgaaaagtttattgcaaccgagaacattgggcacaaatgagtggcgacttccctttgtctgtatctcaacgcgaaacactggcaatgtatactacaccggaatgtactgatatttttgtcgtcaacggccctccgggaacaggaaaaaccactttcctgcaaacagtcatagcaaacagacttgcccataatatcctaaacaatccggaagaaccggaaattatagttgcaagttcagctaataatcaggcgatcaccaatatcctgaaagatttcaaagcggaaacaactaatgacacggcacatccccggttatccaaccgctggctacccgaactagatacgttaggcttatatctgtcaggaaaaaaagaactacaagaacaatacaaaatgatgttcaaccccatgggggatggatttccagcaacatacgatactcccgaacgtcaagaggaatacaaaaacttttatctacaatgtttcaataacttttttggaaaagcctatcaagatgaaacaaaatgccaacaattcctccgtaaggaaatgcaagctctccaaaaaaagattatcttctgtatccaagctgccgaaacaacagaatatggaaaccggaaggaaaacaatatattacagaagtttatccgcaaattccatgagccattaccctcctatgacaaagtaatagaacagtgggctttgacagaagaattcaaagaacgttacgaaaagatcagttccaaccctgagtatggcaacttgccttatacagaagacatggcagtaagactggatatcagttatcggtatcaaatgttctggtatgccatacattatcgggaagccgagtttattcaccggttaagcaagtgcgatgaaggtaaacagcgtacacaggaagcctatacccaaagactaaaacgtctggcttgtgtaatgcctgttttcatctctactttccactccctacccaagtatatgacctatgcggagaacggaaaatgggatgttcccttatacaatggaatagacctgctgattgtagacgaatccggacaagtttcacccgaacttgccgttccctccttcagtttggccaaacaagcgattttagtaggcgatattcaacaaatagaacccgtatggtccatttctgatgaatattcattcattaatttaaagaatctgggcattgtttccaaccagtcctcggaaaaataccgtttcttggagaacaacggtttcctttcttcttccggaagtataatgaaactggcacgtaaaagctgtaattttacagtaaaaggtgaaaaaggagcttttctgaccgaacacagacgatgcgtagattccattattgcttattgcaatgattatgtttaccacggcaggttacttcctaaaaaaggtaacgaagtaaaatacaagtccctcccctctaaaggatatgtacacatcaacagttacagcagccccggaaaaacaggaagccgcctcaaccgggctgaagcggaagccattgtctgttggctggagctggagaaagataatttggaaaagacctataaaaagcctattcatgaaattgtagccgtagtaactcctttcaaagcccaagaggccgaaatacggcatcaaatacaaaaaatatcaggaaatgagaaatataaagagatgatcatcggcacagtacattccctgcaaggtgcccaatgtccgattgttcttttttcaacagtcaactctcctgaagaccattctctttttatggagcgtgatggaaaatacaatatgctcaatgtagcgatatcacgcgcccagcatcatttcattgtttttggcaacatgaatattttccatccggaagaaaatactccggcagggaatatggctaaatggcttttcgatgctccatccaacgagatttccaacaactttatttaccaacaggaaatcccactgtgcacctaccaccccacccttcgtctgtccaccacagaagagcatgttcagactcttcgtcaggcttttgagaaagcaagacgccgcctgctgattgtatctccattcatatctatccatgccatagaaaacgaccagctgattccgttgatacggcatacggtacaacgaggagttgatgtcacaatctacaccgattcgtccctagattatgatatgaaaaataaacatttactcagtcatgccaaggatggacggaacgcattgatagaaagtggtgtaaccctcattgaagtaaaaggtatccacaataaatcgttggctattgataaccatacattaatcgaaggctctttcaactggttgtctgccaatcgccacaaagaatactctcgccacgaatgttccatcattgtatcatcttttcaagccgatgaatacatcaacaatctaataaaagaactagaaagcagagagaaaacctttcaatccctatctaagactataatcaatcttggcattgaccaaaaacatccggggttctttacaaaagaatcttttaatgattgtacagaagaagatatttgccgtataaaacaaaaagtccaaaagttaggtattcagaaaacagtccttccaccttatatccgtaagcaacgtgaaactttcccacgtgcttatgaaccttggtgcacagaagaaaaggaaattatatgtgagttgatgcagaaaaccaatcatctttctatttttatagaatgtctgcaacgtacaggacaagctattcaaattcagatagaaggcaaaaacaattgattataatcctgaactgatatcctttttatgatattcgggaaacttgggaaacaagaatcagtccctatacagaagagaggaaaaggcaaaaagtaatttgccttttcctctcttctgtatagcatatgcaactcctgtcagagttcctcattttttggaacacatccaggtccatttatgccaaatactctctaacggtccctgcttgtgtcctttcaaccaccacttgcagaactgtacttgcaacaaaaagagtacaaaaccaataaacaagctcaacgtatacccacaatacggagccagataaagtccgaagggaaaataaataatagctccggcaatagactgggtgatataattagtcagactcatcttaccataataacgaagatttgatacaaaatccttgaatctgttccgttgataaagcaacacaaaagaggcaaccagcacaaatgtaaaagcaaacttctgccacatatcaaaagccgttccggcagtctggcgaatgagctcactgtcactagccataatcagctctttcagttggaaaagcggagcaaaagcgatagcggaaatgataagagccttcacccaaaaacgagtatgtttttcggaagttacaaataattgtttgcgtccgatatacaaccccatcaagaacaagccggcagtctgccagaaacgtcctgctccaaaagcccaatataaactggctttctgaccaaaggtcatattcttacccaaaaactcccacaagttcccctctttggtatattccgccacttctttatacatcgcgcccactccccaatcgggcaaagtatgagaaggatcaaacagacctactatataatgataccactcaacgggctgcaatagaaacaaaatagctgtaacaagtatggcacagtcactccacttacgcaccacgaacaatacgattcccactactgagaacagcaacaacacatctcctgccggaaaaaaagctgcattcagcgtagcaaaagctaccaataacagcaaacgccacagaaaacgataaccaaaatcttttcctttacgctgttggttagccgactgaatataaaatgtaaatccaaacagcaaagcaaaaatggcatacgattttccagccaataaagtaaatgtaacattgaataccccgtcattcagtatattcagccatgcaagctggtctaccggataaactggaaagatgaaatgttccaaactatgcactaaaagaattgccatgactgcaaatccccgtaaagcatccaccacctcaacgcgtggcagtttttctgataattgtttttccatgaactagttattattgtttgtttaaaattcgttttacccagcggttagccggtttctcaaaataataataagaaagcaggctcagcccgatagtgactgcaaagataagcggaatactgatatacagactgatatgccaatcgtatgtttgcgccaactgcacataagcaaacagtatccacaaatgaatcagataaaagctataactgatatcaccgcctatgaccagatatttattagatagaatacgggaaaggaatcctttctgcaaagagaatatcaacagaaccaacgaaatcggcatccaataataacaggagtaccgataaactttcggcaccaaatccgccgaaaacatataaaacagcaggaagatacataccgcccctacttcgagcaatgacgctgtagagaaagacagctttttggaacggcaccattcataaacccgataaagcaacattcctaccagaaaatcggggaaacgtgccaacggattcacataccaataaccacggatgttcgcctcatccgtcattgacatcaaaacagggactaccacagcgcatactaaaagtgctcctatcaacttctgttttttagcaaaaaacaacgctaaaaacggaaacaagaaataaaacaactgttcacatcccaaactccaggaaggactgtcgaaataaaaaaagtaatccatccggggaacaaaagggtgcaaaaggaacagcgcaggaataaaatgtttcaatccttccccccaacccatcgggttcaatagattacctatcacggctactcccaataaggtcgctatatgcaatggatagatacgggcgattcgtgccacccaaaactggcgtttcgacactttccgctccaccagcttctgctgataattataagcgataataaaaccactcaatataaagaagaaactcacgcctacaaaaccctctttatagaaatgagttgaaaaggtggaatcaacgacatagcaatgtgccccgaaaaccatcagtgcaaaaaagagccgtaaggaagttaatgtattaatcatagtagcattcttttctcaattgaatgtaaaggtacatttcttttccgaactatttattcacatagaacggaaaaacagattggaccgcattattcaccaataaataaaaatatcatccaataaccttatatcacgaacgggcttatatcacgcaacaaaatcatatctttcacagaagcgacgtattgtttttctgactcgacagtgggcaagttgtacaattcgggcaaaccgcctttctgtaaataggcccaataagaagcccggccagcaggttgctgcatcaactgtaaatattcagcataactataggggaatatatgaaattctacataacgtccccacaaaattgccaatcttgtcggtataagatttccgttccagtcccaattgatacgtatttccgccccaaaggttatacttttctaaagctttccatttatcgtccatgctcgaatcttttcccacaaagatagtttttttcgagtatactcggaaaaacatatctatctcaaactgaattaaagaaaacgaatacaatccggcagtatgtaaaatttaacaaattacttaaacaagcaaactattattttcctacatttgttaccagtgaaactttaaatacgaaagaacatgaaagcaaatcctgtatttagtttgtacatccctaccaaattagtatttggttgcggagaaatcaagaaattatccagtgaaaaattaccggggaaaaaggcactagtcgtcatctcatccggaacttccatgcggaaatatgggtatctggaaagagtactcgcccaattaagactgaataatgtagaaacactggtttacgataaaatccttcccaaccccatcaaagaacacgtcatggaagcagccgccatctgccgggaagaaaaatgtgactttgtagtaggcctgggaggcggaagttccatcgactccgccaaaagtatagctgttatggcctgcaacgacggtgactactgggattatgtatcagggggtagtggcaaaggacgccccgtaaccaaagcacttcccattatcgccatccctaccaccgccggaaccggaacggaaatggatccatggacagtaattacccacgaaacggctcaagaaaagataggcttcggttgccagctgaccttccctaccttatctattgtagacccggaactgatggtttccattcccccgcacctcaccgcctatcaagggttcgacgcattcttccatgccgcagaaggttttatcgccaattgtgcaacacccatcagtgatctttatgccttagaagccattcgtttgatctacaaatatctgccagtagctgtagccgacggaaaaaatttgaaggcacgcgccaaaatagcttgggccagcacattggcagggatggtggaggccacttccagttgtacttctgaacattcattagaacatgccatgagtgcttattatccacaacttcctcatggagcaggactcattgccttgtctgagacatacttcgaaactttccggcatgactgtacaaaacgttacatgaaaatggctgaaatgatgacccagaaaaagagcaaccgtccgtccgatttcattgatgcattgattacactgcaaaaagaatgtaaagtacattctatcaaactgagcgagtttggcatccaatccgaagatttccccaaatttctgcaaaatgcaagagatacgatgggaggactgttcactctcgacccacgcccgattacagacgaagaaatcctgcatatctttaaaaagtcttataaataatggataaagaactagaccttgccgtaacctgttacggcaaggtaaaaccattgaaatatgatttggtcctcctcccttggggggctaccgaaccgcataatctgcacctgccttatctgacagactgtattctgagtcacgacatcgcactagatgctgctaaaatggcaaaaacacattacggtattcgttgcatggtcctgcctcacgtcactgccggttcacagaatccgggacaacgcgggctggatttctgcatccactatcgctatgaaacgcagaaagcgattttaagcgacatagttgcctctctatacgcccagggataccgcaaaatggtcattatcaacggacatggcggcaatacattcaaaagtatgatacgtgacttgtcactggactatcccgacttcctgatagccagcagcgaatggtttgcctttgtccctgctaaagagtactttgatgaaccgggtgaccatgcagatgaattggaaacttctgttatgatgcattatcatccggaattggtaaatctggatgaagccggagatggaaattataagaagttcgcttcgcaaatgctgaatgaaaaagtggcatggattccaagaaactggcaaaacgtttcgcaagataccggtataggcaatcctaaaaaagcaagtgccggaaaagggaagaaatacgccgaagtagtcgttgcaaaatatgcactgttatttgaggaattggtacataaagagctttattaatgattcatcactcaagaagaccatctgaccttttttaacgatggtcttctatgtttatatcacctccgtttcttcgttattagatatattttcagctaccttagttatacttgccatccaaagtccatacatatccatataaatatatgtataaccatcgactatgaaaagaataaatttccccatgtgcccataaacaaaccactccctgcactatctgcacaaggatacttcaccaaataatttatttcatccccaaaggctgaaataaaattcatttaacaaaataaagagatttcctttataggataagttctatcagaactacattcttaaattaagtttatatcacatcgcaaatatagaatattttttattaaatcaactttaattataaaattattttttgatatatgacacaaaatgtatgaaacagtcaatattcacggataaataagctaaataaaagtatataaaaagggatatcttttatctttttccgcctcaaagtagcataacagtagaaattcagtagaaaaatccttttaaaattccttcttaaataaaataaaatacaatctattttccctttatggacacggaatagttctgatagaacttcaaacagtaactttaaaaacaaatctatgaagaaaaccttattcatgcttttttgcctgttatgctccataggagccatggcacaaaagaaaacaatcacgggtgtggtcacagacgccacaggtgaagcggttattggcgccagtattgtagaaacaggcaccacgaatggtacagttaccgacttagatggtaattttacactttccgtagccaatgatggcagtatcagagtatcatttgtcggttatcagacacaaactttaagcgtaaagggaaagtcaacttttaaaatagcattgaaagaagactcagaaatgctccaagaagttgttgtaaccggatatggcggcaaacagttgcgcacaaaagtaaccaactccatttccaaggtaaaagaagaaacattaaaacaaggactttattccaatccggcacaagccttatcaggagccgtagcaggtctatccgtcagccagacttccggtaatccgggagcagctcctaccttggtacttcgaggaggtactaattttgacggttcaggttcacctctaatcctggtagacggccaagtacgcagttctttaagtgacattaacccggccgatattgaatccatggaagtattaaaagatgccggcgccaccgccatctatggcgcccgagccaatgacggtgtagtactagtcactaccaaacgaggcaaagagggaagtacacgtgtagaactttcggccaaactaggctggaactacttccacaactcttataactttatgaatgcgcgtgattacatttactggatgcgcactggttacatgaatgcttacacgggagacatgaaacatccagacggatcggccgtacaaggatggtcttcactgaccggtctgactggtgccactccttatggaacaggcaacaaatattgggcagatgatgacaagacaatcccgctgaatggaaacgaaaacagccaggctatatggagtaccatgaaatattcggacgatctggctttcctgctcaaccaaggatgggaaaccatgactgatcctatttatggagaccaactgattttcaagaatacagatatagcggatttcaatatcaattccccatctttctcacaagactacaacctgagtgtaagcggaggaaatgaaaagggaaactactatgcaggtttgggatacaaccatagtgaaggtacagccgtaggaaacaagtaccaacgtatcactttcacattcaatgccgattacaagctgaaaccatggttaacctccaactccagcttcaactttgcagatgcaacctggaacgaccttcctcctacccaaagcgcagaagccaactacttctcacgcgttttatcattacctcccactttccgtggatataatgctgacggtgaaatgcttttgggacccaattcaggcgacggaaaccaacaaatcaattttgacaagtttgtccgtgacaacaatacagacaagttcaccatgaaccaatcttttaccgcagatatcatgaaaggactctcattaaaagtgaacgccatctggttctattcagaagaaaaatatgaagctttcaacaaagattatttatcttctcccggaaactgggtaacctcacacagcacctcggcttcctacgggcgcacattggaccaaacttataatgcagtgttaaactacaactatcaaataaacaaagaccactatctggatgccatggccggcttcgagtactacgactcatattataaaggtttcagtgcctcaggatcgggagctcccagtgacgctttcggtgatttggaatataccagtgatgacaaaggcaaacgcagcatagactcctcacacagccgccagcgtatcatgtcattcttcggtcgtgtaaattatgactaccagtcaaaatacttgctgtcttttgttctaagacgggacggctactccaaactggccaaagacaatcgctggggtgtcttccccggagtatctaccggatgggtgttctccaaagaaaaatttgccagtgaatgggccgatatcatctcattcggtaaattgcgtgccagcttcggtctgaatggtaatgtaaacaaagattttgtaggaaactacacagtacaaggtgcttatgcaggcagcaaatacaacggcaacgcttacttcctattgaacaaccttcctaatccctacttgaaatgggagaagtcaagaactttcgaaatcggtctggatctaggctttctggccaaccgtatcaatgccaatttgacttactacaaccgactgaccagtgacaagtatgccaacatcaccatcccgtctacttcgggtgtttcttcctttacctccaacaacggtaagttccagaaccaaggctttgaattcgaactggcattcaaagttatcgactccaaagactggaaatggaatctgaactggaacggcgcattaaataaaaacaaagtagtggcattgcccgacaacggtctggaaagaaaccgtcaaaatgcatttcaagtatataccggacgccagctggaggacggaagctatgaaaaagcatgggtaggcggttatcaggaaggacaacgtccaggtgatttgtacatgttcgtagccgaaggaatctatcgttccgaagatgaaataccaggagggctgatcgacttgtcaagtggtaacaacggctcaagcaaccgtcccctttacggaggtgaggaaggatataacaaactgacagccaatcaaaaagcgaactccctccgcatccagccgggtgatgtgaaatggaaggatgtaaacggcgacggcatcatcgacaattacgacatggtgaaagtgggcaacactgtacccaaatggacaggaggtatcaatacttcagtcacctggaaagaccttactttatcagcacgttttgactatgcgctcggtttcaaagcggtagactggaaaaccatgtggatcatgtcttgcgcacaaggtacttataataccattgcagaaacccacgacacctggtcacccgaaaatcccggtgcacaatatcctacttatgtatgggccgaccagttgggtaagcgcaattattgccgtcaatcctccatgtttgcctacaacggtgactatctatctttccgtgaaatagccttgtcatataatctgccaagcaactgggtacgcaaagcaggactgggttcagtcatgctctcgttaaccggtcagaacctgggttacctgacagaagccaaacatttattctctccggaaaagacggacaacaatggtggatacccattgcctcgcactgtcattctcggcgtaaacgtttctttctaaacttataaactctaacagattatgaaaaaaatattctatatcctttcaatatgtgtgatgaccattctccagccgtcctgtgatgcactggatctggcaccggaagattattatggagccggaaatttctggaaagaagcttcccagcccaaagcattcatgttgggtctgcacgcccaattaagaagttactatgacatgttctacaccttgggcgaactccgcggcggcacacaacgtgtgggcacctcctcgctgaacaccagcttgaactatgccgatatccggtcacagaatatctcggaagatattcccggcatatccaattggaacggactatactctcctatcatgcaagtaaaccattttatccaagaagtagaaaatgggtgtacgtttctggatgatgcgacccggagccggtatttgggacaagcgtatggcatgagagccctgtattacttcatgctatacagaactttcgggggagtacctctcatcaccaaagtagatatattggacggcaagccatcggcagacaaattctatgtagaacgcgccacacccgaagccacgatggaatttatcaaagcagatattaataaatccgaaaactatttcggaaataacacctcctttgatgcatatgactggtcacgctatgccactttaatgcttaaagcagaaatctatatgtgggcagcgaaagtatccatcaccggattcacagcaaccggggcaaccgatttacagactgccaagaccgccttatccggaatcataggacattttgaattaatggacaactttgcctccatcttctcatgcgacaataaaaagaacgctgagattatcttcgccatgccgtttgtagagggtgaggccagcaatgacggaagcagattcctttatcaggatgctgtatttctggggcaggcacatggtcgtgacggtaaagtaattgaaaaagacaccttaaatttgaaaggtaccggtggggtattccgtgacgagtacacagaagatttctggaaaacgttcaaagaaggagacagccgtcgtgatgccacattcatggagtattacatgaaaaatgataatggtacgctcagcgaattcggatgcgtaatgaaaaaacgtataggtacaatcaattccaatgacaaccgcatttatatttcggacatccctgtttaccgctatgccgatgcgttactaatgatggcggaaattgaaaacggattgaacaacccttgtgcttcgtatatcaacgaagtacgcaaacgtgcatacggagacacctttgaagaaaacaaatacacggaaggcagctatgcggaaaatgaactagccattttgcaggaacgggacaaagagtttgtcagtgaaggcaagcgctggtttgacgtattgcgtatgcacgatgcatccggacgttctttggtcttttctgccgatgccaactatccgggcacaaatcctatcctcggtacagaagaagcatataaaatgctttggccggttaatatcggtactttgaatgtgaatccgttattaactcaaactccgggatacgggaaaaaataagccaaatcctcctgtttatttttcaggacagatgttttaacatagaaaaataaaggtgtgtcgtgagatacacctttattcattatgcatatagttgataaaacatcaacaacacagaaaatcaataactatttccgttcttttgacagctcctccaatgttttttcctcgtacctgcaaatggccttcttataatcctcggaaatcaatttcggttctttggtggccagatcataacccaccatcacggttttacactcacacttcacctcatgggtatccgtagtcacggcacgctgcaacaaggtaaaactcttatgccccaaatgtaccacagccgtttctatcaccagatgatctgagaaaaataccggcataaagaagtttgcattgatattggccaccacaatagccagcttactccagtcggcactgccaaacacatcttttatataagtagtctttgccaaatcatacaaagaaaagtaaactgaattgttcatatgaccaaactggtccacatcgctgaatcgtatctgcaccggcatagtatgcctgaattttatatcctctgccatagttaagcttattaaaatcgttcaaatataacacttttctcaataattgaaccctaaatgacagattattcttaattttgctgcgaaataaatgaatatgtaattttaataacaatataaacatggataagaagtatagcagggagaccttatgcgtacaggcaggctggactccgaaaaaaggcgaaccgcgcgttttgcctatttatcaaagtaccacattcaagtatgacaccagcgaacagatggcgcgtctgttcgatctggaagattcgggatatttctatacacgcttgcaaaaccccaccaatgacgccgtcgccgcaaaaatcgcagcattggaaggtggtgtgggtgctatgctgacctcgtccggccaggctgccaacttctatgccattttcaatatctgtcaggcaggcgaccacttcgtatgctcgtctaccatctacggaggtacattcaacctgttcggcgttacgctgaaaaaactgggcatcgagtgtaccttcattgacgccaatgcatccgaagaggaaatagaccaagctttccgcccgaataccaaagcgttgttcggcgaaaccatctccaatccgagcatcgatgtgctggacatcgaaaagttcgcacgcatcgcacacaagcacggtgtgcctttgattgtggacaacaccttcgccactcccatcaattgccgcccgtttgaatggggagcggatatcgtcacccattctacaaccaaatacatggacggtcatgccaccagtgtaggaggcgccattgtggacagcggcaactttgactgggaagcccatgcggacaaattccccggtctgacccagcccgacgagtcttatcacggactgacttataccaaagcgttcggcaaaatggcttacataacgaaagcaaccgcccaactgatgcgtgacctcggctccatccagtctccgcaaaatgcgttcctgctgaatctgggattggaaacattacacctgcgcgtgccccgtcattgcgaaaacgcacagaaggtggccgaatggctggaagccaacccaaaagtgaaatgggtgaactattgcggactgaaaagcagcaaatactatgatctggcacagaaatatatgccaaacggctcgtgcggtgtcatcgctttcggcttgaacggaacccgtgaggaagcgatagaatttatggacaggctgaaattcatctgcatcgtaacccatgtggccgacgcacggacctgcgtactgcatcccgccagccatactcaccgccagctcaccgacgaacagttgcgcgaagcgggagtcgctccggacttgattcgtctttcagtgggcatcgagaatgtaaacgacatcatagccgacattgagcaagctttacaataagacgaagcggatgaaaagaatcattatcattggcgccacttccggcatcggactggaagtggcgcgatgctatctgaaagacggctggcaagtaggcgtggcaggacgtagagaagaagaactggaaaaaatccggttatccgcgcccggacaggtatgtactcagacaatagatgtcacccgtgaggacgcccctttctcattggagcaactgattactaaaatgggaggtatggatatgttcttgctcagctcgggcataggcaaacaaaatctttcacttcaacccgatatagaattacaaaccgccgccaccaatgtttcgggattcatacggatggtcaatgccgcctatcactattttgagcaacgcgggaaagggcatatagccgtaatcagctccatagcaggcaccaaagggctgggatccgccccagcttattcagctaccaagcggtttcagaacacgtacatagatgcattggaccaattggcacacatgaagaaactaaacatctccttcaccgatatccgtcccggatttgtcgccactcctttgctgaaagatgataaatatccgctgctgatgcatacttcccaagtggcatctcaaattgtaaaagccatctcccgaaggaaaagagtagccatcatagactggcgctatcagtttatcgtattcttctggaaattgattcccggatggttatgggtgaggctgcctgtgcggaaccaataatccccagccaatatcatttcataagaaaaaccccttgttctcatcttgaacttgtgaaagatttgtaaacaaggcgagggtttcttcattctactccccgaaattacctgaatgaaaggaattggttaaaaggaccggcaaagcctgtgatcatgctgatgaaagatcaaacaggctattgaatgatgctttctttgtaaagctgaacctctttacaaacatagaaacttaaaaaaattcttttccctttgtaacaactttcccacttcccccgtctatctgattgaaagcgctttcaaaaaacaatttcagtatgaacaaaaacaaaatagaaccatgaaaaagtttgtatttactctattgctagtcttcgtctgccatctgggctacgcccaaggcatcaacggtcttttcaatgaattcggcagcgaaaaaaatgccgattgtgtcaaagtatcttctttcatgatgtctcttggaaaaatgtctgccggacacgatgaagacgctgagataataagaaaaataaagtcaataaaagtactggacctggaatcttgtacggcaagcgtaaaagaacggttcaacaaaaaagtgaacaaactgaatctgaaaggatatgatgagctgatgcgtgtaaacgatgaaggcgagaaagtccgcgtgctgatgaaaacaaaaaaggaaactatccgtgaactgctgtttgtatgcaccggaaaagaagactgtacactggtacagataaacggaaaattcacaaaggatgatatagacaaattagtaaatcaggaaacaggaaagaagcatggacgccgctgagtttaagcaacaatttctaccttaccaccggaaactctaccgggtagccttccggctgacgggcaaccctcaggatgcggaagatatggtgcaggaagcgtatctgaaattgtggaacaagcgcgatgaactggcggacgtactgaacaccgaagcctattgtgtcaccctcatcaagaatctgtgctacgacgtcctgcgccggagtcagccggatgaagacggacgccctcccgaagaactgaacctccccatggacaccagcatagcccgggaaatagaacagcgggatgaagtgaaccaggtaaaacggctcatcggcagactgcccgagcaacaaaaacgtgtgattctgcttcgtgatgtcaatgattgctcctttgaggagatagagcaagccaccggactgaatgccatcaacatacgtgtgttgctgagccgcgcccgcaaaaagatacgtgaacaatataatgcaataatgaactatgaaagtaaatgaaatagaaagactattggcccggtattacgatggagaaaccagcgataccgaagaaaaggaactgaaacgcttttttactgaagaggacgttccggctcatttacttgccgagaaggaaatcttcatgcaactggcagcacatctcgctcccgaaataccggaaggcctggaaagcaggctgagccgcaagatagacgaatgggatacaggcgaaagacgcacgctgaaaataaaaaaacatatacgggccctccgcttgcaatggataggaagcatagccgccagcctgctcatcctgctctccgtaggactgtacctatacaagccctatccggcaccgcaagatacctgcgccacccccgaagaagcatacgcacaggcccagaaggcacttatcatgctttccagcagcctgaataaaggaatagaaaaggtggaatcggtgcaggaagctaccggaaaaattcaagagaacgtaaacgaacaattaaaccgattaaataacataaaacaatgaaacgtacatatatcattactttattgctctctctgtgctcactgttcacctacgcacaggacagttttttcgacaagttcgctgatatggaaggggtaacctctgtctatatctcaaaagccatgctcagcctgatgcccaacatgaaaacggaaggggtaaatataggcgaagtagcctccaaactggataacatccagattctaagttgtgaaaaacccgacattatcgccaagctgaaaaaggagacagctttcatcagccccaagaacggctacgaggagttgatgcgcataaacgatgaaggcgagaaaaccatcatttatctgaaacggaacaaaaacaaagaaaaggaatttgtattgatgagtcaggaaaaaaatgaatttaccatcatcgccatcacaggaaatctgactctgcaagagatacaagggatcatcaacaaggagtaactccacgcataccccaccctaaggccttttctcccgcctgctaaggtctgaagaaaggatatatactatctccatagcactatggagttatctccaaagcttgcggagttaactccaaaggctatggagataactccgcaggttttggagatagtaaccggacggcctgaaaggcttaacaatagggctgcgaacgcttacgttgtctccggcaaagggttatccgcccgcagagaccctgccagtcaaggaacttatttctttatccgtttttgggtaggcaaagtaaactcatgcgcttcggtcaccgccccgttgctctctgttgcaaaaacacggaattgcgcctggcctgttttcaacttcctgcctccgcgaatggtggccgtataccttatctgattcccgacaggcatataggctatctgagccgaaggtgaaatcaaaatatgtttcatgccgctcatttcctctatcaccggagtaacattgtaagcgggcacatccccatcattcaccacatcgaacaccagtttgctgtcttcttccgcatcaataacatggttacggttatcatcgataaaacgcaggttgatgatcctcaatcctgacgaaggctcataagaggaagtatgctcatactgcgaagaagaaggataagtcttcacgtaatactcctccacctgataagttttctcccgaggcgtagttatggcatttcccacagcagcccccgttacagttcccagcagggcgccgaattgcgaaccgttatatccgccggccctgtcacccacaatagcgcctaatactccgccgatggccgcaccggcttgtactgccgccggattaccttgcattccggatggtgagcaagccgaaagcaaagcggtcggaatgcataaaatgaatatcatttttctcataccccaagtagtttataatctttatcagacagacaaatatactttttcctattgacaatggattcatcggctatgttaaaatttcatttcttgtcattcatcctcatcggtctaaccgccatcattccggatggaaggctcttcttcctaaaatgaaaagataagtctaaataacacaagaaacagaaggagacgtttttttttctatatatttgccgggaaacaaatgaaaagttcttcgccatacccttgcatcgccgcagaaggcttcccccctctccgcagcaaaaccgcacccggtatggcaaggaaatatttacaacctatcattatggaattgaaagcaaaatacgaacagcgcattgaacaggctgaggcagaactccgccaggtaaaaaataagattctccgcatcagcacgctgagggtcttgttatttgcagcagggattataggaacaatctacttctatcaggcaggaacaaccactatatgtctcactatagcggtcactttcgttccttttctggcattggtaaagtatcacaaccggttgtttttccgcaaagactggctggaaacctgcatacgggtgaatagtgacgagctttccgcactggcggacaactatgagccttttgaggacggaaaggaatttacaaacccggcccacaggtattcttttgacctggacttgttcggaaggcactctttgtttcaggccttgaaccgtacctgcacttcattcggaaaggaaaaactggcagaatggttacaaaatcatctggagataaaggaagagataatccaacggcaggaggcgacaaaggaactggctgcttattccgatttccgggaaacattccggattaccggtctgctctacaaaggggcgacaagcgaccgcgaagaaattaaagagtggacggaagcacctgcttatttcagcaagaaatggtggagccgcccgttattgggaatagttcccggagtcaacatcgtactggctatgctgggagtggccggggtcattccgatgacatggttcggactggccttcggactgttcgtgataggtagtttcggactgataaagcctgtcagcaatctgcaaagagtttatgacaagaaattacgtatcctgtctatctacgccgaactgatcagcctgatagagaaccgggaaatgaacgctccgctactcagacacctgaaagctgaattcggcatggacgggaaatccaccacccatattttgaaagagctttcacgggaactggacaaactggacttgcgcaacaaccaactgttatatgtcttgctggaaggttccatgttctggcaactccggcaggtaatgcgcattgaacaatggaggcacaaatatggaaaatatctgcttcactggctggacgtcctgggtgacattgatgctctttgttcgctggcgacatttgccggcaaccatcccgcatacgcctatccggccattgccggcaagccttttgttttccttgcaaaggatatgggacatcccctgatgcctgcacggcaatgtgtgaccaatgatgccgatatcccctcaagaccgttctttgtcatcatcacaggagccaacatggcagggaaaagtacttatctgcgtacgatcggagtgaattatgtattggcatgtaccggctgccctgtatgctgttcctcccttgaaatatatcctgccaaactagtgacaagcttgcggacttccgattcgttgacagacaacgaatcttacttctttgccgaactaaaacgattgaaacaaattatagaccgcctgaataagggagaggagttgttcatcattctggatgagattttaaaaggaaccaactcgatggacaagcagaaaggctcattcgccctggtacgccaactgatggaactgaaaacgaacggtatcattgccacacacgacctgctattagggaaattaatagaatatttccccaaagagatacggaattattgctttgaagctgatatcaccaacgatgaactgactttttcatacaaactccgtgaaggtatcgcacaaaatatgaacgcttgcttcctgatgaaaaagatggggctaatcatcaacgactaaccccacccaacaatttatcacattaacgtcttaagcaaataaagcagaccttcacaggcacaccttatttcataacataaagagtcatagaaaatcaaaattcacttgtttccaagcaatgtacaaacgcacttgcatcgtctcccgtgaaataaaacacagaagatgcaggctcgtatgtataggggatgaaacggaacaactgggccgcaacgaatttcttatcctgagaaatcatatagtccatacgtacgtttccgtttgtctttactttcacgtcattcttggtttcaaaaccttttttctccaacgtttccgttaaagcctgtaaatcgcatacatcaaagaagcaggctccttctttagctacactgccggtaggtgcatatacccattccttgcttcgccagaaaaggcggaatacggcccacagaaacaaaatggttccaccagccataaacaccatactcatggtggatgaggaatcccccatctttaaagaggttgcaaatgcacctgcacctatcacgcaaaggatagcggatatgataacagaagaaatactagtacgttttacgacatcaggatgtgttgttgaaaataaggtcgcttcagtagaaactgtattactcataataatttaaattttattctttactaattaaaaagacaataattcataccaaggtcacatctcgccatcaccgacaagacggaaccatgaaaaaacaaattggtaaaagaataaaagctaaatgagaatacgcctcataccgaagatatagtgctcgcaagcactatcccaatgaagggagtgggaagaggcatacacatgggtatgacagcttgcaagactggccatccgggcggccatcttacgcaacaaagtctttataaattgggtagtctctatggaggaaaaacggtacatacgctctgcagaagcactgacacgatgtgctaaagtatgagcatccccaaactccatatctgctattcccttattgctatccatgggaatgacactatcctcattgatggagtcctgcggagtagtatccgtattctgtacagtacataccgtcattaacgcagctggaactgcatcaacatattctgttctggcaaaagccaaagcaaacagaaaaaataatatgactgttacaaatcctctcattgcttactgtttgagttacaaagataacataaatagcttcttaggtttcatttcatacaataattaacaaatatcaaaggtattttgttttaaaggagatttgaaggattatcaaaagatatgaaggatcagctctcaactccttcatgatttctttttgagatacaggcagttatctatccatgaaggttttgaaggaattattcagtgttcttaattccggctttaatctaaaagctgttctcgttctgtatgcttcgttcatatcaaaacttttgtaaacaggacaagtaatatttatgtggacgaaagcgctctcagcttgttttctcattactgccggtcatggcataaaataaaaaaaagccacagcttttatagctatggcttttatatatatgatgatatacagattattcagctttaggggcttcctctgtagtttcagctgccgatgctgcaggagcttctgtagcggctgcactcttcttagaacgacgagtacgagttgctttcttagcagttgcagtcttagccatgttttcatcgtaatctaccaattcgataaagcacatttcagcattatcacccaaacgatgacctgttttgatgatacgagtgtaaccacccggacgatctgctacttttacagagatttctttgaacaactccgttacagcaaacttatcttgcaagttgctaaatacaacacgacgtgaattagttgtgtcgtctttagattttgtaattaaaggctcaacgaatttcttcaaagctttagcctttgcaacagtcgtagtgattcttttgtgcttgatcaaagaacaagccatgttagataacatagcacttctatgagaagcagtacgacctaaatgattgaatttcttattatgtctcattttttattctttatctaatttatatttagagatatcggtcccaaacgacagattcagaccctcgagcaaatcatcaagctccgtgagcgatttcttaccgaagtttctgaacttcaacagatctgtcttgttgaactgtaccaagtcacccaatgtttccacatcggcagctttcaagcagttcaaggcacgaactgagaggtccatatcaacaagcttagtcttaagcagctggcgcatgtgcaatacttcttcatcaaattcttcattgccgtccacatcggatgtttcaagagtaatcttttcatcagagaacaacatgaaatgataaatcaatattttagcggcttctttcaaagcttccttcgggtgaatggaaccatcggtagtaatttccaataccagcttttcgtagtcagtcttctgttcaacacggaagttttccacctgatattttacattacgtatcggtgtgtaaatagaatcgataggaattacattaacatcggtacaatattcgcggttttcatcggccggaacataccctctacctttattaatagtaatgtccatctgcattgttgcttttgaatctaaatggcaaataaccaattcaggatttaacacttcaaatccagtcaaatacttacttatatcacctgccttaaattcactagaattctcaacggtaatgcttaccttttcattttcgaactcttctactacttgcttaaatctgacttgcttcagatttaagataatgttggtcacgtcttctttaacaccaggtacagatgcgaactcatgttctacaccttcgatcttaatcgtattgattgcaaatccttccaatgaagaaagaagaatacggcgtaaagcattacctacggtaataccgaaaccgggttcgagtggacggaactcaaattttccaaatctggagtccgcttccaacattaatactttatcaggtttttgaaatgctaatatcgccatgaaattaattattatttagagtacaattcaacgatcaagtgttctttaatgttttcaggaatgtctgctctttcaggtatatgtaacaacttacctaccttagaactttcatcccactccaaccaaggatatttgctatgattgaatcctgcaagtgaattagcaatcacttccaaagatttagatctttcgcgtacacccacaatctgaccgggttttacagagaatgaaggaatattaactacctttccatctactgtaatgtgcttgtgacttactaactgacgggcagcagcacgagtcggagcaatacccaaacggaacaccacgttgtcaagacgagcctctaaactctgcaacaagatttcaccggtaataccgttagcacttgcagccttttcaaacaggttacggaattgtttttccaacacaccgtaagtatatttagctttttgtttttctgccaacatgacaccatactcagaagtctttcttcttctgttgttaccatgttgtccgggaggataattcttcttagataaaactttatctgctccaaagattccttcaccgaatttacgggcaattcttgattttggtccagtatatctagccatttctttttctaatttaattgttactaatgaacttaatttgttgcagccgcgattacagaaaggaagtgcaatccattattaacaaaatcaagttacatataaaaataggttatctattaaactcttcttcttttcggaggacgacaaccgttgtgtggaagcggagttacatcaataatttcagtaacctcgataccagctccgtgaacagttctgatagcagactcacgtccgtttccaggaccctttacataagctttaacctttctcaggccaagatcaaacgctactttagcgcaatcttgtgcagccatctgtgctgcataaggagtgttcttcttagaacctctaaatcccatcttacctgcagaagaccatgagataatctgaccttcactatttgccaaagatacaatgatgttgttgaatgaagaatgaacatgcaactgtccattagcgtcaaccttcacatttctcttcttagctgcgactgttttttttgccatatcaacaattattatttagtagcttttttcttatttgcaactgttttctttcttcccttacgtgtacgagcgttgttcttagtgctctggccacgaaccggcagaccaatacggtgacgtacaccacgatagcaaccaatatccattaatcgcttaatgtttaattgcacttctgaacgaagatcaccttctactttgtattcagcaccaatgatttcacgaattctagcagcctggtcatctgtccagtctttcactttcacatctctgtcaacaccagccttatccaagatttttgctgaactactgcgtccaataccatatacataggttaacgcaatctcgcctctcttattctgaggcaaatctacaccaactattcttatagccatatactaaattattttttttgcaaaaataataaattatccttgacgttgtttatacttaggatttttcttgttaataacatacaaacggccatttcgtctaacgattttgcattccggcgtacgtttctttaatgatgctcttactttcatatcttatttcttttttatttgtatctaaaaacgattcttcctttagataagtcataaggagacatctctactctgaccttatccccgggtaatattttaatgtaatgcattctcatcttgccagagatatgagcagtaatctcatgcccgttttctagctcaacacgaaacattgcattagacaatgcttcaactataactccatcttgttctattgcggattgctttgccatattaaattgctttatctcctaatacttgttcgacatattcaaatgaggacaaaatatctgccttcccaactcctattgcaactgtatgctcaaagtgagcggcacatttcctatcgcgtgtacgcactgtccatccatctctttccattactatttggcgggaacccaatgttatcatcggttcgatggcaatgcacataccctttttcaacagagtgccatatcctctttttccataattgggtacctgcggatcttcatgcatatcttttccaatgccatgacctacaaattctctcaccacaccataggaattagcctcgcaatgttgctggacagcaaaacctatatcacccaaacgctttccatgaatggcattctctatacctaaatataaagcttcttttgttgtcttcaaaagtttcaagacctcaggatcaacttctcctacacagaaagtataagctgaatccccacaaaaaccattcatataagtaccacaatcaacagaaacaatatcaccttctttcaaaggggtatcattgggaataccgtgtacaacctgatcatttaccgaagtacacaaggtactggggaagggatcaccatactgatttggaaaacctttaaaagtaggaacagctccattatctctaataaactcttcggctaccttgtcaagttccttagttgtcacaccgggttttatcaatttagcaacttcagccagagtcctacctacaagtaggttactctgacgaagcagctctatctcatcatctgtcttaagaaatatcatctcagactaattaatatgcagcaacattaccagcacgccccttgattcttccagaatttaacaatccgtcataatggcgcatcaacaaatgactttctacctgttggagtgtatccaatacaacacctacaagaatcaataaggatgtaccaccgaagaactgggcgaactcagcttttactccaaaaatgccagcaaatgcaggcataatggctacaagagccaagaatatagaacccggcagagtaatacgagacataatcgcatctatatactcagctgtattcttacctggttttattcccggaataaaaccattatttctcttcatatcttctgccatctggttaggattaattgttattgcagtatagaagtatgtaaacacaataatcaatattgcaaaaacaaaattataccagaagctagtatgatctacaaatgcacgtacaataccacttgcggttgcagcatttgagaaacctaccaatgtaatagggataaacatgattgcctgggcaaagatgataggcattacattcgcagcattcacctttaaaggaatatattgtcttgcaccaccatattgtttgtttcctacaatacgttttgcatattgcacgggaactttgcggacgccttgaaccagcaaaattgctgctgcaataacgaacaacaaaaatactatttccaacaaaaacatgatgataccacctgcacccggagaagccaaacgagaaacgaactcctggaataaagattgtggcagacgggcaataatacctatcaaaatgatgaatgatataccattacctatccctttatctgttattctttctccaagccacagaataaacatacttccagctgccaaaatgatggtagaagtaattataaagaatgtccaatctaatgaagcattaagtgatggtccggcttgcatcttaaggttaagcaagtatgagggagcttggaaaaccaaaattgcaattgtcaatatacgggtatattgattgatttttcttctaccactttcaccttcacgctggattttctgaaagtagggaacagcaatcgccaaaagctgaattacaattgatgccgagatatatggcatgattcccaatgcaaaaatagatgcattagaaaacgctcctccagagaacatgtttaacaaggctaacaaaccttcactcgtttgtttatgcaactgagttaacatagcagggttaatacctggcagaaccacgtaagaaccaaacctgtaaattgcaacaaataatatagtaatgaggatcctttgtctcagatcctcaattttccatatattctttaatgtttcaatagattttctcattgaatcagagttttactgcattaccaccaacagcttcgattgcagctaccgcactctttgaaaaagcattagcttccacatcaagcttagtagtcaaactaccgttacctagtacttttaccaattgattagaagaaatgaaaccagcttcaataaagtcattcatacctaccttagtcagattcttagcttcagccaatttctgaatagtttcaaggttaatagctttatattctacacggttaatattcttaaaaccaaacttcggaacacgacgttgaagaggcatctgtccgccttcaaaaccaatcttctttgaataacctgatcttgatttagcacctttatgacctcttgtagaagtaccacccaaaccagatccggggccacggccaattctttttctagtctttgtagatccttctgcaggttttaaattacttaaattcatatcgtaattagtttttttattaacaatgaattacttaacgatggcaaccaggtgttttaccttttcaaccattcccagaatagaaggagtttcttcgtgctcaaccacacgattcatcttgcgaagtcccagcgcatcgagtactcttttttgatcagcaggagcaccaattctactttttatttgtttaatcttaatagttgacataattcctccttatcctctaaatactttttccatacttacgcctctgttctgagcaaccatacgggcatctctcatctcacccaaagctaaaatagtagcttttaccaagttgtgcggattagaagaaccttttgacttagccaaaacatctgtaatacccacactttccaaaacagcacgcatcgcaccacctgctaccacaccagtaccggtagaagccggcttgatgaatacttcagcgccgccaaatttagccgactgttcatgaggaactgtacctttcaatacaggaacacgagtcaagttctttttagctgcttcaacgcctttagcaatagcagctgttacttcacctgctttaccaaggccccaaccaataataccgtcttcgtttccaacaacgacaattgcagaaaagctgaatgttctaccaccctttgttacctttgtaacacggttgatagcaaccaatctgtcttttaactctatatcgttagttatcttaactctattattaactgccataattgattaaaatttaagtccaccgttacgagcagcgtcagctacttcttttattctcccatgatacaagtaaccattacggtcgaatacgacagtcgtaataccagcttcctgagctttcttagcaatcagttcaccaactttagcagcctgttctttcttaggcatagcttccattcccaaagatgaagctgcagccaaagttctaccagacaagtcatcgataacttgaacgtaaatctgcttgttacttctaaacacactcatacgcggacgttcagtagtacctgaaatcttattgcgtactctatatttgatcttgattcgtctttctaattttgttgtcatgataatacaattttatgtaaattatttagcaccggctgacttaccagactttctacgaatttcttcgccaacaaacttaatacctttacctttataaggttccggcttacggaaagaacgtatttttgagcaaacctgaccaagcagttgtttgtcacaagattccaatataataagagggttcttatttctttctgacttagtttctaccttgatttcaggaggcaactgcataaagatattatgagtataacccaaagcgaaatcaataatattaccattgtttgaagcacggtaacctacaccgacaagttccagttctttcttataaccttcagaaacaccaataaccatgttgttaaccaaagaacgatacaagccgtgaaaagcatgtctttgttttatgttatccaacatctcgttttcgttttctgtcaacatcacatgtccatcttcaattgcaacattgatagaaggatcaacaaattggctaagttcgcctttaggaccttttacagtaactacattatccttcagagtaactgttactccagtgggaatactaatgggtaattttcctattcttgacattgcttatcctcctattaatatacataacaaagaacttcaccaccaattttcagttcagcagcttctttgttagtcattacacctttggaagtagatattatagcaatacctaaaccattaataactctcggcatgtctttgtaacccgtatacttacgtaaacccggagtggaaactctaataagtttcttaatagcatttactttgtttactgagtcgtacttcaaagccactttgatagttccttgaggaccatcttctacaaacttgtagttcagaatgtagcctttgtcgaaaaggatcttagtgatttcctttttcaaatttgaggcaggcacttctactactctgtgctttgcactaattgcatttctcaatctggtgagataatctgcgattggatctgtcatataataataaattaaattaatcaggactaccctgacaatatttaaaaataaaaagaattaccagcttgctttcttaacgcccgggattaaaccattagaagccatttcgcgaaactgaattcttgaaatcccgaactgacgaatatagcctttaggacgaccggtcaatttacaacggttgtgcaaacgaataggattagcattcttaggaatagcctgtaatttctgagcagcttcaaaagcttcagcaggatcacctgagttgacaatctttttcaacgcagcacgtttttcagcatatttggctacaagtttggctctttttacttcacgagccttcattgattcttttgccataatatattaatctttttttgagtttttaaacggtaaaccaaattccttcaacaaagcataaccttcttcatctgtcggagcagaagttacaaaggtaatattcattccgagaattttagtaatactatcgatatttatttcagggaaaatgatttgttcctgaatacccaatgtataattacctcttccatcgaacttactttcgatacctttaaagtcacgaatacgtggcaaagcaacacgaacaagtttttcaaggaactcatacattctttcacgacgcaaagtcaccattacgccaatcggcattttcttacgcaacttaaagttagcgatatctttacgtgaaactgttgcaacagctttctgacccgtaattgctgttaactcattaatagcaacttcaataatcttcttgtcagcaacagccatacccaatccttgattaataacaatcttcttaagtacggggatctgcattgttgaagaatattggaactgattcttcaatgcaggcgcaatgcgctctgcatattctttcttaaggctagcagtattactcattatttaatctcctctcctgattttttagcataacgaacaaatgttctaccatcagaactttctcttcttcccacacgtgttggcttgcctgttttaggatcaaccacattcaagtttgagatatgtatagcagcttcctgcttcacgataccaccctgagggttctttgcattaggtttggtacttttcgataccatattgataccttctacaagtgcacgtccttctttaacaagaactttcagcacacggccagttttacctttatcttcaccagagtttacgtaaactgtatcgcctttttttatatgtaatttactcattacttaaatcttttacaaaattaaagtacttcaggtgcaagtgataccactttcatgtttgcagcacgcaattctcttgcaacagggccaaaaatacgacttcctctaatttcacctgcattattcaacaatacgcaagcattatcatcaaaacgaatataagaaccatcagcacgacggatttctttcttagtacgtacaattaaagcctttgatactgcaccttttttaacatcactagaggggattacactcttgatagaaactacaatgacatcccctacagaagcgtaacgtctctttgtaccacctaatacgcggatacaaagagcttctttagcgccactgttgtcacacactgtaagtctggattctacttgtatcataattacttagctctttcaattatttcaaccaatctccatctcttagttttgctcaaaggacgagtttccatgatgtgtactgtatcacctacattacattcattcttttcatcatgagcatggtattttttcgttttagaaacgaatttaccataaatagggtgtttttctttaaacttagcagcaacagtaatggtcttatccatcttattgcttactacaacacctgttctttcttttcttaaatttctagcttccatgaggaccattattatttgttaagttctctctgatgcaattctgccttcatacgcgcaatcgttctgcgtaactttttaatctgtgcaggattatccagcggagagatagaatgatttaaaaccatctgattgtaattggctacttcagcttcaattctttctgccaattcattggtagctatttctctaatttctgcaatcttcataataaattaagcattttgattttgagcatcgtaatcacgtctaactataaacttagtagtaacaggaagcttctgtgctgcaagacgcaaagcttctttagctacctcataaggaacaccttctgcctcgataataatacgtcccggggtaaccggagcaacgaaaccttcaggagcacctttacctttacccatacgcacatcagcaggcttgcgagtaataggtttgtccgggaaaatacggatccaaatctgtccttgacgttgcatatatcttgttaccgcaatacgtgcagcttcaatttgtctacctgtaatccatttagtctccaaagatttaataccaaatgatccaaaagccaattggtttcctctttgagcatttcctttctgactgcccttctgctgtcttctgaattttgtctttttcggttgtaacataattcctaaaattcaaatccgttagcgattgtttttctttcttttgaagttcttaccaccgttattgttgccgtttccaccgcgaccgctttctttagtctgagtaaagttgggcgctaattctctcttaccatacacttcaccacggcaaatccatactttaatacccagcaaaccaactttagtcaaagcttctgcatgacagtagtcaatatctgcacggaaagtatgcaacggagttcttccttctttatacatttcagaacgagccatttctgctccattcaaacgtcctgaaatcaacactttgataccctcagcgcccatacgcattgtgttagcgatagccatcttgatggcacggcggtaggcaatcttaccttctacctgacgagcgatattattagctacaataacagcatccaactcaggtctcttcacctcaaagatattgatctgaatatctttgtccgtgattttcttcaactcttctttcagtttgtcaacttcctgaccacctttaccaatgataatacctggacgcgctgtacaaactgtgattgtcaccaatttcagtgtacgttctataacaattcttgaaacgctggcttttgcaagtctggcattcaaatatttacggattttgctgtcttccaacaaagcatcaccataatcattgccaccgtaccaattagaatcccatcctctgataattcctaaacggttgcttatcggattaactttctgtcccatctagtcttaattttgattatcattagtactcttagaatcaacgaacaaagtcacgtgatttgaacgtttacgaattctgtaacctcttccctgcggagccggacgcattcttttcagtgttgcaccaccatcaacataaatctttgttacaaacaattcgccactttctgccttacgttcgtttttctgttcccagttagcaatagcagagcgcaacagtttttccactcttgcagaagcttctttagaagaaaacttcaagacacccagtgcacggttcacttccataccacgaatcatgtcagccacgagacgcattttccgcggagaggtaggaacattttgcaattttgcaaaatacatggtcttaagggcttcttttcttttttcagccgatattttttttcttgctcccattatttattactttattatttcttcagattatcctgcttattttttcttattacctgcatggccgcggaatgtacgtgtcggtgcaaattcacccaatttgtgtcctaccatgttttctgtaacgtaaacaggaataaatttatttccgttatgaactgcaactgtgtgccctacaaaatcaggcgagatcattgaagctctagcccaagtcttaacgacaaccttcttgccgctttcattcatagcaagcactttcttttcaagtttaacgttaatatatggacctttttttaatgaacgactcataatttactcaattaatcagttattactttcttctctcaataatatacttagaagactgtttcttcggagctcttgtcttcaagcccttagcatacaagcctgtacgtgatcttgggtgacctcctgaagcacgtccttcaccaccacccatcgggtgatcaacaggattcataacaacaccacggttgcgaggacgacgccccatccaacgagtacgacctgccttaccggaagactccaatccatgatcagagttaccaacgctaccaatagtagccttacaagcactaagtatttgtcttacctcacctgaaggcaatttaatcacacaatacttgccttctcttgaagttaactgagcaaaattaccagctgatctcaccaaagctgcaccttgacccggacgcaattcaatattatgaattacagtaccaacggggatgttttcaagcggaagtgcgttaccaatctcaggcgctgcattcgctccagacatcaatgtgctaccaacttgcaatccattaggagcaataatatatctcttttcaccatcagcataaaacagcaaagcaatacgagccgaacgattcggatcgtattctatagtcttaacaactgcgggtacaccgtctttgtttctcttgaaatcgataagtctgtattttctcttgtgaccaccgcccatatagcgcattgtcattttaccaacgttgttgcgaccacctgttgagcgctttccaaatacaagagacttttctggtaccgatgcagtaatctcttcaaaagtaccaataattttatgtctttgccccggtgttgtgggcttaaatttacgtactgccatctttattaaatattgctataaaaatcaatagtatcgccttctttcaatgttacgatagctttcttataagcattcgtacgaccattgatgattccagacttagtgtaacggcttttactctttcccgagtatcttagcgtatttacatctactactgtaacattatacaaagcttcaatctcactcttaatttccaacttgttagcttcaggacgtacaataaaaccgaatcgatttaacttctcggtaattgcagtcattttctcagtaaccaacggtttaataataattcccattatctaagcctcctttttaaattaagataagatattctcgatagccttgagcgagttttctgtaacaacaagagtttcagcattcaatacattgtaagtatttaatgcagaagcaattgccacattagcacgttcgatgttacgagctgacaaatatacatttttattagcttccggcaaaacgagaagcaactttttgtcagtaattttaagattatttaccatagaaacgaaatccttagttttcggagcttcaaatgtaaagtcttcaacaataatgattgcgttttcttgagctttataagacaatgccgacttgcgggccaatgtcttaacttttttattcaacttaaaccaatagtcacgaggtttaggaccaaatacacgagcaccacccaccaataccggagagttgatatcaccacgacgagcaccgccaccacctttctgacgacctaatttacgagtagaaccgctgatttcgcttctttctttagatttatgagttccctgacgttggttagccataaactgcttaacgtccaaatagatagcgtggtcattgggttcaattccgaagatagattcgtttaacgtaacctttcttccggtgtcttcacctttaatatttaatacgttaacttccattatttctcaattattacgattgaacctttgcaacccggtaccgaacctttaatcaaaagaagattgtgttccggaatcacttttaatacctgtaagttatgtgtagtaacgcggtcaccacccatttggccacccatacgcattcctttgaatacttttgcagggtaagaacatgcaccgatagaacccggcttacgagcgcggttgtgctgaccatgagtagtctgacctaccccaccaaatccatgtcttttaactacaccttggaagcccttacctttagaagtaccaacaacgtcaacataagctgcatcattgaataattccactgtaatagtgtctcccaaattcaattctgtttcaaaatctttgaactcggccaagtgtctcttcggagttacaccagcttttttaaagtgccccatcaaaggtttggtagtatgtttttcctttttgtcctggaaacctacctgaacagccgcatagccgtctttctcaacactcttaatctgagtaactacacaaggaccagcttcgataacagtgcatggtacatttttaccatcagcactgaaaacggatgtcattccgattttctttcctaataatcctggcatttcagttaatttttaaatgcattaaactttaatttctacttcaactccactcggtaattctaacttcatcagagcgtctactgtcttagctgttgagctatagatgtcgattaatctcttgtaagaagacaattcaaactgttcacgtgacttcttgttaacgaaagtcgaacggtttaccgtgaaaatacgcttgtgtgtaggcaatggaataggaccgctaacaatagcatctgttgccttcactgttctaacgatcttttcagcagacttgtctaccaagttgtgatcgtaagatttcagtttaattctaattttttgactcattagattttaaattaaaaatgattaaatataaagtggggccggattaagagtcattcgctaacccgttgcccctgcttttttattatactaagtctacgcgacctttcacttcttcaagtacagctttagcaatagagctggaaacttgagcatgatgatcgtaagtcatagatgatgttgcacgacctgaagtaatagtacgcaaagctgttacataaccaaacatttctgccaaaggcactttagcttttacaatacgagctccagaacggcttgattccataccttcgacttgcccacgacgcttattcaagtcaccaataacatcacccatgttttcttcaggagttacgacctccagtttcataataggctcagtcaatacaggacctgctttagcacatgcatttttgtaggcttgaatagcacagatttcgaatgacaactggtcagagtcaaccggatggaatgaaccatccttcaaaactactttcagtgaatcaagcggatagccagccaatacaccattcttcattgcggtctggaaacctttctgaactgatgggataaattccttaggaacattacctcccttcacttcatcaataaactgcaaaccgccttgtgtaaagtcttcgtcaaccggaccgattgtcacaatgatatcggcaaacttaccacgaccaccagactgtttcttataaacttcacgcaattcaacagtcttagtgatagcttccttataattaacctgaggtttaccttggttacattctactttaaactcacgtttcagacgatcgataataatatccaaatgaagctcacccataccggaaataatagtctgtccagactgttcgtcagtcttaacagtaaatgtcgggtcttcttcagctaatttagccaagccgttagacaacttgtccaaatctttctgagtcttaggttcaaccgcaataccaattacaggatcagggaattccattgattccaacacaatcggtgcatcttcatcacacaacgtatcacctgtacggatatccttgaaaccaacaccggcaccaatatcaccagctccaatcacctctacaggattctgtttgtttgagtgcatttggaacaaacgtgacacacgttcttttttacctgaacgagtgttatagatatatgaaccagcctctatcttaccagagtaaacgcggaagaaagtcaaacgtccgacataggggtcagttgcaatcttaaatgccaaagctgacgttttttcatcctcactaggtttacgatcttcctctgctcctgtgctcgggttagtacctacgatagcaggcgtatccaacggagaaggcaagaatgcacaaacatagtcaagcaatgtctgaactcccttattcttgaatgaagagccacagaacatcggaacgatatccatcttcaatgtacctgcacgcaaagcacgcaagatttcttcttcagtgattgtagaaggatcgtcaaagaatttctccattaaagcatcgtcaaactcagctactttttcgagcattttttctctccattcattagcttcatcaaccaagttcgccggaatttcttctacgctataatctgcacccattgtttcatcgtgccacaaaatagccttcattttgatcaaatcaacaacccccttgaaactctcttcagcaccaataggaattaccacagggcaagcatttgcacctaatacatccttcatttggcgaacgacttcgaaaaagtcagcaccagaacggtccattttattaacgtaaccgatacgaggaacattatatttatcagcctgacgccatacggtttctgactgaggttcaacaccacctaccgcacaataagctgcaacagctccatccaagacacgtaaagaacgttctacttcagcagtaaaatcaacgtgccccggagtatcaatcaagtttattttataagtatttcccgcatatttccaacgagtagtagtagcagcagatgtaatagtaataccacgttcctgctcctgctccatccagtccattgttgctgcaccatcatgcacctcaccaattttgtgagtcaagccagtgtagaacaaaatacgttctgaagtcgttgtcttaccggcatcgatgtgagccatgataccgatattgcgggtcaaatgcaaatcatgtttagccattttcgtcctttacttattaattattacttgattagaatctaaagtgagcgaatgcacggttagcttcagccatacggtgcatatcttctttacgcttgtaagcgccaccctgttcgttaaaagcgtcaataatctcagccgccagtttatctgccattgatttaccaccacgtttacgagcgaaaagaatcaaatttttcattgagattgactctttacgatcaggacgaatttcagtaggaacctggaaagtagcgccacctacacgacgagactttacttcaatctgaggagttacattatccaaagctttcttccaaatttccaaagatgatttttcttcattaggaagttttgttttcactgtttccagtgctgcatagaagatctcataagatgtattctttttcccatcatacatcaagtgatttacgaatttagaaaccttctgatcattaaatactggatccggaaggatcacacgtttttttggttttgcttttctcatttttttctcaaaataatgtttttgtttggggctgcactttttccgtttacttcaacgcttcctctgaaacatttactcaacctttatagcttattccaacaaaccaaaacttaaattaaatattctttgtttcaggaattcagttacggtttacttctttccttttccttttgcaggagctgcagcttgtcctgctttaggacgcttagcaccatatttagaacgtctttgtgtacgaccagctacgccagctgtatccaaagtaccacgaacgatgtgataacgtacacccggaaggtctttcacacgaccaccacgcaccaacacgattgagtgttcctgcaagttatgaccttctcccggaatataagagtttacttccttagagttagtcagacgcacacgagcaactttacgcattgctgaattcggctttttcggagtagtagtatacacacgaacacaaacgccacgtctttgaggacatgaatccagtgccggagatttactcttctcaaccaaaacctctcttccttttcttactaattgttgaatagtaggcattttgtttgatttttaattattatatattgtttattaatttgctatactaagtccaaaactatacattttgggctgcaaagttacgaataacattttaataaacaatactttctactaataaaaatagtctgtttctcaaaaaaagtttttgaaaaacagactactatgttatttttgctacaaaagcccttatgcctcccctttaaatccgcttataggaggaatgaatgtttttccatccggtccattatttcccccattcatttcttccggcattcgaataggtccaaaattacgttcgtattttgcaacattctcctgtaatgcatacatcaaacgttttgcatgttcaggggtcagtacaatacgtgactgcactccagctttgggcaatcccggcattacacgcacaaaatcaacaataaattccgaactggaatgggtgataatggcaagatttgcatacgttccttgagctacttcttctttcaactctatctgcaactgattattatttttttcgttttccatgattttatactttagcattaaaaaatattctgaatctcaatatccccaactcctattctttggttggagtacaaatatagacatttatttgtaataatacaacatacttattattctatataattttcctatagcatctactataataaacctaaagaggctgatttcttagacagaaatcagcctcttttacagtgtatatattaaaattactctacctcactataatcgagtacattcttacgattggcaagaatacggtcatattcttccttcgaaccaacaataatcttttcgaattcacgctgaccagtaccagcaggaatcaagtgaccacaaatcacattttccttcataccttccaatctatcaaccttaccattaatagcagcttcattcaaaactttcgttgtttcctggaatgatgcagcagacatgaaactcgaagttcccaaagcggcacgggtgataccttgcaaaatctgggtagatgtagcaggaatagcatcacgtacctcaacaggcttcaagtcacgacgtttcaacatactgttctcatcacgcaacttacgagcagtaacaatctgacccggctgcaaattctgagaatcaccagcgtcaacaactactttcttgccccaaatacgatcgttttcttccataaactcttgcttatccactacctgctgttccaagaagcgagtatcgcccggctcatcgatttctaccttacgcatcatttgacgaacaataatctcaaagtgtttgtcgttaatcttcacaccctgcaaacggtaaacgtcttgcacttcatttacgatgtattcctgtacagccgtgggacctttaatggccaaaatgtcagcaggagtaatcgcaccgtcagacagcggagttccggcacgaacgtagtcattctcctgaaccaatatttgtttagacagattcaccaaatactttttcacttcacctgtcttagatgtgacaataatttcacggttaccacgcttaatcttacccatagtaatttcaccgtctatttcagaaacgacagcaggattagatggattacgagcctcaaacagctctgtaacacgaggaagaccaccggtgatatcaccagccttgcctacagcacgaggaatcttcacaataatgtcaccagctttcactgcctgaccgttttcaaccacaacatgcccccccacgggtaagttataagtacggatcaaattaccatcctcggttacaatatgggcagaaggtacttttgtcttatccttagactcgataatgataatttcacgcagaccggtagcttcatcagactctaccttataagttacgttttcaaccacactctcgaattcaatcttaccagtagcctctgtgataataacagcgttgaacggatcccacttagcaatcagttttcctttctcaacaatatcaccgtccgcagcatataattttgaaccataaggcacgttatgagttgacaggataattcctgtattcacatcgataaagcggacttcagccaaacgaccgactaccactttcacagcctcacccatttcatcaaccgtatctaccgtacgtaattcttcgaattccaaacgtgcattattcttggcgacaatgcttgcattagcagccatattacctgcgataccaccggcgtggaatgtacgcaatgtcaactgtgtacccggctcaccaatagattgagcagcgattacaccgactgcttcacctttctgaaccatacgactggatgccaagttacgtccataacacttagcgcatacccctttcttagattcacaagttaataccgaacggatttcaacgctttcaatcggagaatcctcgatttcctgcgcaatatcctctgtaatctcctctccaccggctacaatcagtttaccagtagtaggatggacgatatcatgtacagaaacacgtcctagaatacgttcgtacaaagttgcaataacttcatcgttattcttcaaggccgtacaaaccaaaccacgaagtgttccacagtcttcttcattaataatcacatcatgcgacacgtctaccagacgacgggtcaagtatcccgcatcagcagtcttcaacgcagtatccgccaaacctttacgagcaccgtgggtagaaataaaatactctaacacagacaaaccttctttaaagtttgaaagaatagggttttcaataatctgtgcgccttcagcaccggctttctgcggtttcgccatcaaaccacgcataccagacaactgacgaatctgctctttagaaccacgggccccggagtcaagcatcataaatactgaattgaagccttggtcatcattcttaatcgtcttgtaaagtatatcagacaggtcactgttcacgtgagtccatgtatcgataacctggttataacgttcattgtcagtaatgaaacccatgttatagttcatcataatctgttccacttcctcattaccacgttttaccagttcttctttttctttcgggataataatatcacccaagttaaatgacagaccacccttgaacgccatatagtaacctaagttcttaataccatccaagaattcacaagcacgtgcaacaccgacagctttgataacatcactaatgatatctcgcaaagactttttggaaataatggtattcaagtaccccacttccgctggaacgatttcatttacaatcacacgccctacggaggtttctttcatcatcacatctacgattttgccatctttgtccaagtccttcaccactacgttgacgatagcatgaatatccactttaccttcattataagcaatcaaagcctcttccggaccgtagaaagtcaagccttcacctttagccccttttctcaacttggtaatataatacaaaccaagtaccatatcctgtgcaggcacagtaataggagcaccattagcagggttcagaatgttatgagcctgaagcatcaacatctgtgcttccagaatcgcatcattactcaaaggcaagtgaaccgccatctggtcaccatcgaagtcggcattgaacgctgtacaagccaatgggtgcaactgaatagctttaccttcaatcatatgcggttggaaagcctgaatacccaaacggtgcagagtcggcgcacggttcagcaatacaggatgacctttcatgacatgttccaagatatcccagatcacaggctccttgcggtctacaatcttctttgcagattttacagtcttcacaataccacgttcaatcaacttacggatgataaacggcttgtaaagctctgcagccatcagtttaggaataccacattcacccatcttcaattcaggaccaacaacgattaccgaacgagcagagtagtcaacacgcttacccagcaagttctgacggaaacgtccttgcttacccttcaagctatcggacagtgatttcaatggacgattagcgtcagtcttcactgcacttgatttacgtgagttatcgaacaaggaatcgacagcctcctgcaacatacgtttttcgttacgcaaaatcacttcgggagccttgatttcaatcagtctcttcaaacggttgttacggataatcacacggcgatacaagtcattcaagtcagaggtagcaaaacggccaccatccaacggaaccaatggacgcagttcaggaggaataaccggcacaatacgtacaatcatccattcaggtttattacgtccgcgagatgcacggaacgattcaactacctgcagacgcttcaaagcctcattcttacgttgctgcgaagaatcattacttgctttatgacgtaattcataagataaagcatccaaatccaaagttgagagcagatcataaatagcttctgcccccatcttagcaataaacttattcggatctgtatcttccaaatattggttttctttaggaagtgtatccaagatatccaaatactcttcttcagaaagcaaatcatatttattaatgccatcttcagccttcacacccggctgaataaccacataacgttcataatatacaatagcgtctagtttctttgtaggcagccccaacaaataaccgatcttgttcggcaatgaacgaaaataccaaatatgcgctacaggcacaactaactgaatatgtcccatacgttcacgacggaccttcttttcagtcacttcaacgccacatcggtcacaaacaatacctttataacggatacgtttgtacttaccgcaatgacattcgtaatctttcaccggaccgaaaatacgctcgcagaacaaaccatcacgttccggtttgtaagtacggtagttgatcgtttcaggcttcaacacctcaccgctcgaattctcaaggatttcttcgggtgaagccaagccaattgagattttcgagaaattactctttatcttagtttcttttctaaaagccatacttccttatttataatgtaaagagttatatttttttattattcaaggttgatactcaagccaagacctctcagttcgtgtaacaatacattcagagattcggggatacccggagttggcataggttcacctttcacaatagcttcgtaagtctttgagcgtcctacaacgtcatcagacttaatggtcagaatttcctgtaagatatgtgctgcgccgaatgcttcaagcgcccaaacttccatttctccgaaacgctgaccaccgaactgtgccttaccaccaagcggctgctgagtaataagggagtacggaccgatagaacgggcatgcatcttatcttcaaccatgtgccctagtttcaacatataagttacacccactgttgcaggttggtcaaagcgttcacctgtaccaccatcacaaagataagtcttacaataacgaggcaatccagctttatctgtccattcatttaaatcatccatagaagcaccatcaaaaataggagtagcaaatttcacacccaactcttttccggcacgacctaatacggcttcgaaaatctgaccaatattcatacgagaaggcacacccaacggattcaatacgatatctactggagtaccatctgctaagaacggcatatcttcctgacgaaccacacgagaaacaatacccttgttaccgtgacgtcccgccatcttatcacctacaccaatcttacgcttcttggcaatataaaccttagccatctgaataatgcccgcaggaagttcatcaccgatagtgatagcaaacttcttacgctttaattcagcatccaattctttatatttcttcaaataattcatcaccaagtcgcgaatcatatcattcttatgagcatcagctgtccacttgctcaactggataatagtataatccaatgattccaaatcgcgtttggtgaacttcgcccccttggcaataacttccgttcccaaataatctttcactccttgggaaaccttaccattagtcaaaaccaatagtttctcaatcaaaatatctttcagttttgctgccttttcttcgaattcatcattcagtttaggcagaatagccttatcggcattcttctcacttctactcttgataacacgtgagaacaacttcttgtcaataacgacaccacgtaatgacggagaagctttcaatgaagcatccttcacatcacctgccttatcaccgaaaatagcacgaagcaatttttcttccggagaaggatctgattcacctttcggagtaatcttaccaatcaagatatcacccggttcgatacgtgcacctacacgtacaataccgttttcatccaaatctttggtagcttcttcactcacattaggaatatcagaagttaattcttccataccgcgtttcgtttcgcggacctccaaaatatattcatcaacgtgtacagaagtcagcaagtcctcacgtacaacgcgttcattcaatacaatagcatcctcgtaattataacctttccaaggcatataagccaccaacaggtttttacccaatgcaagctcaccaccctgagttgaatatccttcagtcaggatatcacccttcttcacacgttggcccttatcacaagtaggacgaaggtcaatagtcatgctttggttggttttacggaatttaggaattctatattctttcaaagcaggttcgaagcttacgaattcctcatcttcatttctatcgtacaggatacggatagtcgttgcatctacatattctacaacaccatcaccttctgcagcaatctgagtacgagagtcttcaaccaattgtttttcaatacctgtgcctacgataggagcttctgtacgcaacaaaggaactgcctggcgcatcatattcgatcccatcaatgcacggttagcatcgtcatgttccaagaacggaatcaaagaagcagcaatagaagcgatctgctgtggagaaacatccattaactctacttggtcaggagtaacaaccggataatcagcatcacggcgggcttttactttctcacgaacaaatttaccttcatcatccaacggggcattaccctgagcgataatcttatcctcttcttcttcggctgtcagatattcaataccttcatcagatatatccaccttaccatcagctactttacgataaggagttgaaataaagccaagctcattaatcttagcatacacacacaaagaagaaatcaaaccgatattcggaccttcaggagtttcgatcggacataaacgaccatagtgagtatagtgtacgtcacgaacctcgaaaccggcacgctcacgtgacaaaccaccaggacctaacgctgacaaacgacgcttgtgagtgatttcagccaacggattagtctgatccatgaactgagacaaagcatttgtaccaaagaatgaattgataacagaagaaattgtctttgcattaatcaaatcaatcggtgtaaacacttcattgtcacgtacgttcatacgttcacgtatagtacgagacatacgtgccaaaccaatcgcaaactggttagacaactgctcgcctaccgtacgtacacggcggttgctcaagtggtcaatatcatcaacatccgctttagaattaatcaactcaatcagatacttgatgatttcaataatatcttgttttgtcaataccttcacatccatatccgtagtcagacccaactttttgttgattctatagcggcctacttcaccaaggtcatatcttttttcagagaagaacaggttgttgataacctcacgggcactggcatcatcagccgggtctgcattacgcaactggcggtagatataaagcacagcctctttttcagagttactcgggtctttctgaagagtattaaatataatagaatagtcggatgaattcgcctcttccttgtgaacaaggatattctgaacgcctgaatcaataatttcatcgatatgctcctcttcaattacagtttcacggtcgatgataacctcattacgttcaatagaaactacttcaccagtgtcttcatctacgaaatcttctgtccatgttttcaaaacacgagcagcgagttttcttcctacgactttcttcaaattagtcttgttaactttaacgtcttcagccaagttaaagatttcgaggatatctttatcattttcaaagcctacagctctcagcagagtagtaacaggcaatttctttttacggtcgatatacgcatacatcacattattgatgtctgttgcgaattcgatccatgaacctttgaacgggataatacgggcagaatacaatttcgtaccgttagcatgtacgctctgaccaaagaatacccccggagaacgatgcaactgagaaacgactacacgttctgcaccattaattacaaaagttcctttcggagtcatatacggaataggacccagataaacatcctgaatgactgtgtcaaaatcttcatgatcaggatcagtacaatacagcttcaatttcgccttcaagggcacgctgtatgtgaggccacgctccagacactcgtctattgaatagtgaggcgggtcaatgtaatagtccaagaattcaaggacaaagttattacgagtgtcagcgatagggaagttttcagcaaataccttgtacagcccgtcattcttacgtttttcgggcggggtatccaactgtaaaaagtcttggaatgacttcaattgcacttccaagaaatccggatacttcatcggattcttaatggaagcaaaattaactctttgattttcagtatttgaagacatttgttaatattttgtagaacttaataataatatagacacaaaaaggttaagaatcctctaccagaggattcctaaccgtattacctgatactcaggctaatattatttaagctcaacttcagctccagcttcttccaaagttttcttcagtgattcagcttcgtctttagccaagccttcttttactgtgctaggagcaccgtctaccatgtctttagcttctttcaagccaagaccacatgcttctttaacggctttaacaacctgcaattttgcagcaccagcgctcttcaaaactacatcaaaagatgttttttcttcagcagcagctgcaccagcagcaggaccagcagcaacagctacagctgcagcagcaggttcaataccgtattcttctttaaggatagttgcaagttcattaacttcttttactgtcaagttaactaattgttctgcaaaagctttcaaatctgccatttttgtatgattttaattgtttgttactaattgattataaaattgattattcggcgcgttcgcccagagttttaagtactccatgaatggtgttaccacctgattgaagagctgaaataacattcttcgccggtgattgcaacaatgcaataatgtcagcgataacctcattcttactcttgatattgcagagagcatccagttgatctgcacctacatagaaaccttcttcggcataagctgccttcaatgcaggaatgtcctctttgtattctttcaacaactttgcaggagcgttagctacttcgctaaacattacagaagttgtacctttcaaagaattgaacaacggagagaaatcaacatcttccatgctcatcagagctttgtgaagcaaagaattcttcacaacaaccagcttaataccggctttgaaacattttcttctcagttcacttgtcttagctgcgtccatagcagttgtgtcaaccaagtaaaaatgtccgtattgcttaacggtttcagccaactgaccaataataacgcctttatcttcctttctcatgattcctccttattattagttttcttctacagttttgggatcaatcttgacacccttactcatagtacttgaaagataaatactcttaatataggtacccttagctgagcttggtttcaatttgatgatagtagcgataaattctttcgcattatcacgaatctgatctgcagtgaaagacaccttaccaattgaagtatgaacaataccgctcttatcaaccttaaagtcaatcttaccttgcttaacttccttaacagccttagctacatccatagttacagtaccactcttaggattcggcattaatccacgaggaccaagaacacgacctaaagcaccgatcttacccatgatagacggcattgtaatgattacatcaatatcagtccatccacctttgatcttttcaatatattcatcaagaccaacatagtcagcgccagcttcttttgcagcagcttcagcatcaggtgtacacagaaccaaaacacgtacttgcttacctgttccgtgaggcagcgaaactacaccacgaaccatctggttagctttacgagggtctacacctaaacgtacgtcaatatctaatgaagcatcaaatttagaaaaagtaatatctttaactaactgtgcagcttctttcagtgagtatgctttccctgcttcaattttttctgcagccaacttttgattttttgtcagtttacccattataattgaagtttattagttattacccgggaattccccttttacagcgatacccatacttctagctgtaccagctaccatagtcatagcagactcgatagtgaagcagttcaagtcaaccattttgtcctgagcaatcgtacgaacttgttcccatgtaatttcggcaactttcttacgattaggctcagcagaaccactcttaatcttagccaattcaagcaattgaatagctacgggaggagtcttgataacaaaatcaaaagacttatctgcgtagtaggtaatgattacaggtaaaattttacctgctttgtcctgggttctggcattgaattgcttgcaaaattccatgatattaatacccttagaacccaaagcaggtccaacgggaggtgatggatttgcagcgcctcctttaatctgtaatttgattagtccagcaacttctttagccattttgtttctaatttttatatattaattatagcgaaagtccaatgcacgtaacagaatgcattattctttctcgacatccataaagccaagttccagcggagttttacgtccgaagatcttaaccataaccttcaacttccgtttttcggtgttcacttcttcaatgagaccactgaagccactgaacggtccaacggtaactttcactgtttcgcctacggtataaggtacattaagttcctcaccactttcctgaagttcatccaccgtaccaagtatacgattcacttccgattgtctcaaaggaaccggattttcggaacctcccaagaagccgattacattcggagtgtttctcaaatgatgagcaacttcaccgaccaaagcggcctcgactaaaacgtatccgggaagataacttctttctttcacaattttcttaccattgcgaacctgatacactttctcggtaggaatcaacacctgagacacatactcgctaaggtcactgttcttaatgtcagcatcaagatattctttaaccttgctttcttttccactaacagcacgtaatacgtaccactttttttcaatctcagacattttattcaattaattagtgcggatagataatatcctccattacaaactggaagactgaatccataagaaaaacgactaacgcaatgagtagggaagcatataaaacaaccactgcgctactagaaagttctttacgagtcggccatgatactttatggactaattcgtcgtaagattctttacaataatttgctactttctgaaacatattctttcaagtttagcacgggaggagaggttcgaactcccgacacccggttttggagaccggtgctctaccaactgagctactcccgtaaaaatcagttcccgaagccttacgaccgagaactgatcatatatatttatccaagtgttagtcaagaagttctgttatctgtccagcacctacagtacgtccaccttcgcggatagcgaaacgcaaacctacattcaatgcaaccgggtaaatcaactcaactgtaatagttacgttatcaccaggcattaccatttcagttccttccggcaaagtgatttcacctgtacagtccattgtacgcaagtagaactgaggacggtatttattgtggaacggagtatgacggccaccttcttctttcttcaagatataaacctcagctttaaacttagagtgagccttaacctgacccggcttacacaaaatcataccgcgtttgatttcgtttttgtcgataccacgcaacaacaaaccaacattatcaccagcttcaccttgatccaacaatttacggaacatttcaacaccagtaacaacagatttcttatcttcacccaaaccaaggatttcaacttcgtcacctacatggataacaccagcttcgatacgacctgtagcaacagtaccacgaccagtaatagagaacacgtcttcaacaggcatcaagaaaggtttatcaatatcacgcggaggcaatggaatccacgtatcaactgcatccatcaattccattactttctcttcccattgaggaacaccattcaaagcacctaatgcagaaccgcgaatgataggagtattatcgccatcgaaatcatagaatgaaagcaattcacgcatttccatctccaccaattccaacatttcctcgtcatcaaccatatcacacttattcaagaaaacgaccaaacgaggtacatttacctgacgagccaacaggatatgctcacgagtttgaggcatcgggccatcagttgcagcacaaacaataattgcaccatccatctgagcagcacccgtaaccatgtttttcacatagtcggcgtgacccggacagtcaacgtgagcatagtgacgatttgcagtttgatattctacgtgagaagtattgatagtaatacctctttctttttcttcaggagcgttgtcgatagaatcgaaagaacgcaattctgaaagaccttttttagccaacacagtagtgatagcagcagtcaaagtggttttaccgtggtcaacgtgaccgatagtaccaatgttaacgtgcggtttcgaacgttcaaatttctctttagccatagctttacttgttatttatttgattaataatcagcaattacgttattaaagagctgttaacgagacttgaactcgtgacctcttccttaccaaggaagtgctctaccactgagctataacagcaaaaaaaagagcggaagacggggctcaaacccgcgaccctcagcttggaaggctaatgctctatcaactgagctacttccgcaaaaaccaaagacctttcaagtctcaaaaagtgtgggcaaagatggattcgaaccaccgaagtcgaaagacagcagatttacagtctgccccatttggccactctggtatttgcccaacttatttttcaaagaacaactagcttctcagcaccttttcttgagcctcttgtcggattcgaaccaacgaccccgagattacaaatcacgtgctctggccaactgagctaaagaggcttgtcatacctaacttcacaaccattccaccttggatggttaagcggctgcaaagttagatatttattttaaatctcaaaaactttcagcgattttttttatttaccgcgcagtttttctttatattttgtcaattgcttggaaagcgcatctacgcacacatcaaccgactcttcaaatgtatcactcaccttttctgcaaaaaattctccattaggcaccaacactttcatactagcctccttattcattgcagtttcaggctttacaacttttaatgacacctccactttatttatatcgtcacaatacttttctaacttagcagtcttcttctggataaaatcctgaagtctttctgttgcatcgaaatgaatagcttgaattctaacttccataaatacctccttttttttacgctcttggatgagcttgttcataaacttttttaagttcctcaaaagtcgtatgcgtatagatttccgttgtagtcagactactatgacccagtaattcttttaccgcgcccaactctgcctcattattcaacatagcagttgcaaaagtatgcctcaacacatgcggacttctttttttcagcgataccacttttgaaaggttccgtttcactaaaagatatacctttccaggatacatccgttttccgttctttaaaacaaagaacgccccagcctttccaggtaacacttcattccttatcttcaaataaacaaacatcgcccttcgcagttcttcaccgaaaggaatcaaccgctgtttatttctcttccctgtcacttttatcagagatgcagagaaatcgacatccacgtcattcagccctattaactcggaaagccgcatgcctgtagcataaaacatttccaataccattctatcccgacaacctgtaaaatcctccttaaaaggaacatcatccaaaagtcggtccatttcacgttctttcagaaatacaggaagaggcttcttgtttttcggaccaatgattttcaacatcggatcctcccctatcacacctttctttagaaggaaacgataaaacgatcggagtgaactcagtttccgatttacagaagcagatgtatatccgtcctctatcaggttcatcacccaaccacgaaccaaatcagcatctaccgttgtaaaatcgacattctcatcttttcccctgatgtattcttcaaacttgatcagatctattccataactaactattgttttctcagaatagtttctttcaaaccgaagataatccaaaaaagagtctgtcatcataagaaacgtcgcttatcaattcagcaacgaatatatgaaaaagaattcaattattcaaagaatgtgcgagtttttaattattcttctacttgctgaagtttctgaacatagatagcacgttctcttttcagcctgttcaatacagacggcttgtcaaactgctgtctagctcttagttcttttacaacacctgttttctcaaattttcttttgaacttcttcagcgctttttcaatgttttcgccttcttttactggtactacaatcattgtttttaattattaaatatgttgttattaatattttcagatagtcaaattgcggcgcaaaattacacatactttctttatttacaaaactttccgcaattatttatttaaaataatctagaaatcgtatctttgctttccagtacaaaccattataaacctattaaaatgaaatcggaaattataaatagaatagttagtctgcgcaatttcatgcgtaaacacaagctttcagcctttattatccccagtacggacccccactcgggagagtatatccccaaacattgggaagcacgtaaatggatatcaggtttcacaggttcggcaggtacagttgtcgtaacgctggataaagccggactttggacagattcacgctattttcttcaagcgaccgcacaattggaaaacacaggcattactttattcaaagaacgattaccggaaactccttccattgtagagtggttgggctgtgtattgaattcagaagataatgtgggtatagacggttgggttaacagctatcaagaaacaagcaacttacagaaagaattagaaaaaaaacagatacacttaacccttactcccgatccattcaatgaattatggacagaccggcctgcattgcccgacaacaaagtttttatacatgaattgaaatatgccggtctcagttgcaaggataaaatcactcaaatacaagaagccacccgtcgtaacagttgcacaggcattctaatttctgcactggatgaagtggcatggactctaaacttgcggggaagtgacgtacactgcaatccggtttttgtgagttaccttctcatcacggaatatagttccaccttatatataatagagaataaactgtcagatgaagtaaaagactatctagcagaaaacggagttacagtgaaaccttattcaacaattgaaaaagatttaaaagattttaccggcaaactcctgttgtcagctagtatcaatgcagccattcatgcagcagcctgcacccattctttaatagaaatagctccttcacctgtactttttttaaaagcggtaaagaatgagacggaaatagaaggcttccatcgcgctatgaaacgcgacggaatagccatggttaaatttctccgctggctgaaaacagctgtttctactggaaatgaaaccgaaataagtatagataagaaattatacgaattccgtgccggacaagactacttcaatggtatcagttttgacaccattgccggatataaagctcatggcgctattgttcactatgaagcaagccccgaaaccgatatccccttaaaacctgaaggtatgttgctgctggacagtggagcacaatatttggacggaacaactgatattacccgtaccatcgttttaggagcgctcacgaaagaagaaaaaacggattacacattagtcttaaaaggatttatccaactctcaatggctcaatttccacatggaacttgcggaacacaactagatgcgctggcccgcctccctatgtggaaagccggaatcaactacctgcatggaacaggccacggtgtaggttgtttcctgaatgtacacgaaggtcctcaccaattccgcatgaaccacatgccagccttacttgttccaggcatgacagtaaccaacgagcccggtatatataaagccggccgtcatggagtacgtacggaaaataccatgttaattgttccgtcacaagagacagaatttggtacttactataaattcgaaccacttaccctctgccctattgacaaagaagccatcctaacagatatgctgagcgatgaagaaataacatggttcaaccaatatcatgaaaaagtttacaattgtttgagcccggaattgaacaacgaggaacgcgagtggttaaaagaagtaacatctcctttaaaacggtagaaattaattatggcacttataaaatcagtaagaggattcactccaaaaatcggcgaaaactgttatttagccgataatgccactattattggtgatgttgtaatcggaaaagattgcagcatttggtttaacgccgtattacgcggcgatgttaatgctatccgcataggcaaccgcgtaaatatccaggatggcagtgtagtacacacactatatcaaaaatcagttgtagaaatcgggaatgatgtttctgtaggacataatgtaaccatacatggcgcgactataaaagacggcgctctgattggaatgggctctaccgtactagaccacgctgtcataggtgaaggagctattgtagctgctggagcactagtactcagtaacaccgtcatcgaacctggaagcctatgggcaggagttccagccaaattcgtcaaaaaaattcctgaggcacagagcaaagagctcaatcagaaaattgccaatggatatttaatgtatgcttcctggtttaaggaggaagaaaaataattctacatataaagaaaagttagtattcatttaaaatgattgattatgaaaaaaattattattgcagcatgtatgacgcttttaagttttagttctgtttttgcacaaaaaggaaagcaagctattggtggtaatctaagttatggaactgaaatagagagtattggtcttggtctgaaatatcaatataatattactgatcaaatcagaatcgagccatctatgaattacttttttaaaaatgacggacttagcatgtttgacatcaatgcaaatatccactacctttttcccatagcaagcaatgtaagtttatatccattagcaggatttacatacactaactggcatttggatttaggaaaagtaggcgattacgatgtcagtggaagtgatggaaaattcggagttaatttaggggcaggcatggagtttaccttagataaaagctggagtctaaacctcgacattaaataccaattaattagcgatttagatcaagcagtattcaatcttggcgtagcctataatttctaattaataaccagagaaggataaaagtgcttttaaatgcacctttatccttcttcaccttacaaagaacaaacctgctctacctatttttacactaacttacaaatatggcacactatgaataaaatacgactactcacaaaagatgagctcccaaaagctatcgaactatcctggcaagttttcaccattaccagcaaagaagatttcaacgatgagggattagaatttttcaaaagctttatttataacgaaaaatatatagacgaaatcacattttacggtagttttaacaataaagtcctaacaggcattttaggtataaaaaataatggtaaacatatctccttattttttatcaagcctgaatatcacaggcaaggattagggaaaacccttttccactacgtcttcgcccttcatccttccattgaaaccacggttaattcttctacttacgccattcctttctaccagagtctgggatttgctgtcgtaggagaaaaacaaaattaccacggactctgcagcacccccatgagacgctatcatgctgtatttgtacaaaagcaaaagtacacactacgtacctggcaaacagaagacgctcattcattagttcaagaactgaataacaaaaagatttgggacaattgccgcaatgtattcccccacccttacaggctggaacatgcagaaacctttattgacctcatcaagaaaaaagaaggtattcatgatttttgtattgaagtcaatggaaaagccgtaggtaatatcggatttatacccggcacagatgtggaatgcttcaatgccgaagtagggtatgttatcggagaaaaatattggaaccaaggtattgtaaccgacgcattacaagaagccatctaccattacttcacttatacgaatacaatacgtatattcgcacttgtctttgagcacaactttccttccatgcgagtattagaaaagaccggcttcaacaaagtcgggataatgacaaaatccattttcaagaatggtcatttcaccaatgcccatcttttcgagttgcttaaaaacacttaatgttcaaaaaatgccaaaagaacttacaatgaatgttatattacacatattcatcctttgtccgaaagacataaccccactcctttcacagtctttatctgtatccgttcatcatcagcaaacagttttctaagtcgagtaacaaaaacatcgagactacgtgatgcaaaaaaatcatcctccgtatcccatagtcttgaaagaataacatcccgtcttactagttcatttttctttttacaaagcatctgaagcagtttcgcttcgcgttccgtcattgtcttttgtacacacgacgaacactttaatactgcatgaacagcatcaaatgtataattttcaccaatctgataaacctcactttcattagcagctcccattccctgcttcattttcaacaaggcaccaatatgcgcatccagttcttccgccaaaaaaggtttcttaatataattattcactcccagttcataacctttcaccacatctttaggcgaaactctacccgaggtaaaaacaatgggaataaatccatccgtttcccggatacgacgtaccatttcataaccatccataacaggcatctcaatgtctgaaataatgatatcgggatgttgctccttccatatcctcagcccttcctcgccattggaagcagtcatcacctcgtatccacctatcatatcctccaatccaccacggataatgtaacaaagattagtatcatcttctaccaacaacagttttatcatatcatcttccttctttaaaaaacatttataccctctcctcactcggcaaaaaaagaagaaattcactatactccccttcaatgctttccacacacacttttccaccatgcgcctcggccacgcggaaaacataattcaaacccagtccgaaacctgacgcaccacctttacggctgcggtcggcagccgaagcacgttcgtatttctcgaagatacggctctgatccttcaacggaatacccatgccgttatctcttacctttatcaaataaaagttatggtcctggcgcaaggatgaaatctgtatttccacctcttcacctgaatattttatagaattgtctaccaaattaccaatagcttctttcaagaattcttcatcagcatatacccattctgattccaaacgaagagagaaatgtacaggtttatctgccttagcagtatatttctcaatgaggtcctctaacatcggacggagttgtacctcctctttccaaagcctcaattgagcattttccaattttgacagcgtcagcaccttgttggtcagtgacaataaatgttcactctcgtcctccaatatctgaaaatgcttctcacgtttatccggataaatatccaactttcctgatttcaacattcgggtccccatcaagatacaggcaagaggagtcttcatctcatgaatcatggcgtatgagaaatcctcacgcattctagctattttattctgatgggcaataatacgaatctgataaacaagacaatagacaatcattgccatcatcaagacagtagcaatgagaagcaaggtcatctgttggaaaataatccaataaggattaacaataaaagcctgaagattctccgtgcgtttataattgataggttgtaatccggttttcaacaaaccataatcccccacctgtatggaacgggagcttctaagaatattccccagcgaatctgtcacacaggttattacctctgcatccaatccttcggcagcaagacctgtccgataaatagaatctaaacttgacaaagaaacagacaatttataatccctcttgacaatctcttgcatggaaacctgcatattggacatcaaccattggttcacattttcatcaaccctgtcatccttaaaaagatcataatcttcatccaagcttattctaaccataatggaagtatctctgtccttatacttcttttgcaaagaatcttgatatacttccatgcgataaaacacctcacgcatcgttgcatctctaaatacttcattgcttctgaactgtatactttccttagttagcttataagtatttacaagccaaacgtactgcaaactgatgattgccaacagtccaatacaagccacccaacgaatatgtttgattgtcatacacttatatcctatccatactttgttaacgtaatgttaatatattaaatttatatctatatttataactgttttattttcaaagatttaatgattttacaaacatgaaacacaattaatgcgacatacaatttgcatacacatagtgtatttagaagaaaatagaaacaaatatttgtaagggaacgtttcactctccgggtaaaaaatctcctgtgttcgtttcgttcgtacggtattttacccttcgcccttgacaaatactctgttctttactgacaggtgtttaggaaaaaagaaaaaaatgttgtttttcggtggggtgtccgttttgtcattttgttaccggaatttgttcgcataatggaagaaccgcaccgaccagtcgggtacgcaatatcattttgtaataattagcgggctgtttttagagtgtgtcatcccgatattggttttttgcttttagatatagaaattcaaagggggtgtgtcaaaattgcccacctctttttttacgcacaaagaaggtgcatcgcgcattacgacacacctcctttcatgtgctcgcttactcttccatctcaacaatattttcaaaatatatcttccagtctgattctgaataagccataccagttccggcaggaacatacagcgtagcccctttaaccaaatctgcgctgaaagaaccatcaaccaccccatgcagtttaggagggacaacggcgtagcatcgcaattgtcttatcggtgcattatggaatgctatatcttctatagaagccaccccactgcctaatgtgacattggtgagaagagagcagccggaaaatgcacctgagcttattgttgcaatatgattgggaatggtaatgcgggttaaagaactgcaatcgctaaaagcaaaccattccaatgaaacaacactattgggaatggtgactttggttagattgacacatcctctgaacaatgctgaaccaatgaccgacactccgtccggaatatctatggctctaaggctactgcaaccggaaaagtcggtaagtgccttgattccttccgggaatgtaatactagcaagcttggtgcagtctgcaaaactgccgactaccgttgtgccttccggaacagtgatatcggtaataccggttccactaaaaatggaggtttcatacagatagtcaggtactttgatgtcggaaaggctggaacaaccgtaaaatggagcgtcgactgtatttacactattaggaatggtcacactgcgaagggaggtgcaattctcaaaagcaccgtactccagtgtggtcattgtgctcggcaaagtaacatccacaagggagctacagtcggcaaaagtccatttcttaatcaatgtcattccttcgggaagaacaatgcttttcaaagctgaacatccattaaaagcctcatactcgattgatttcacactattgggaataacaacactgacaagtcccttgcactcgtaaaacgttctttcctcgatagaagtcaccttattaggaataatgatatttttcagattggtacaaccgtagaatgcatgggctcctattgaagagacgctattgggaatatggatctctattagtccgctacagtttattaatgcactttctttgataaacgttgacccgttagacaacgttattcttagattttcacaatcagagaaaagagcattatccaaaagatttccggacatggcgatggaaaggtctgcattgttcctgaaagcctggctgcctattgaagtgacggtttcgggtattgtcattgtaagatgggaacaatactcgaatgcacgaccccctattgactggatattgtcgggaataatcatgttacgcaatgaaacacaaccactaaatgtagcattgtttattgctgtgatttttttcggtatatttatttccgagagcttggtacaaccattgaatacaccttcccctatgaaagttagaccatcaggcagtgtgacattggtaagatttgtacacttgctaaaagcgtcatcgcctatttcagttacactgctgggaatgatgatatcggtcagtcccgagcactgccaaaaagccgcatgtcctatcgatgtcacactttcaggaatcgtgacgctgacaatacccgggcatttctgaaatgcatattcttcaataaccgtagttccttctgcgatggtcacgcgaacatctttgcagttagaacctatcggattttctattttagtcaaaaaacgccccggtatggttatatcaagtccagtacagtcggaaaaagtcagcatactcattgattccacattgtccggaatagtaatggtgagtccattgcagccactgaaagcgaatccctcaatggtggtcaggctattgggcaacttgacacttgacaatttctcacagccataaaaggcactgtgtcctattgttgttacaccttccggcaaatcaatacgggaaagactggaacaaccccaaaaagcactgcgcgctattgttgtcacaccttctggtaggacaatatcagcaagactggagcaatactcgaaagccgccattcctatcgttttgacactattctcgtagataaccactttgttaagagagtggcacgaggaaaaagcacggtcatctattgatgtgacacttttaggcagtaatatcgtctgtaaaccgcggctggtaaacatacgttcgccaatggtgttctccgttggcaaatactcctttcctgatgagttggggagataatattctccatccgctacgatattcgcctcggtcatatccaaataaaccaatttcccttccgtgttggcgtgattatatgttcccgccatttcacggataaatgcaatgtcctttcctcctaagtttccggaaacttccagttcctcaacattcagtttttctgattctgcaatatagtcagacaatgtgccggccttttctacatgaaccttcaccctctttcctttggcggactggctgacggtcaaagtctcttcaatcccgctggtggtattcttgaaaacaacttctgctgttcgcgaagtttcacccgtattctcagctatcttcaaatactttttatgcgttgacaatccacgggtggaagtctcgcttatccactctacatccggaagctgcatctcaaagtccacgtttgcgtcaattttcacttcaaccgtaccgccttcactgccgaccttcacctctttctctgaaatgatgatggcatctttctgcgcttgcaggatggtcagtgtgtcagctatgctgctatccgacttgtcacggtatatgatttcagttttcctgccgtcataagaatcattgggtgcaacagtataatgcagtgtgtggctggacatgccgcgtgtcatggtctcctttatccaatctacagaaggcatgacgacctcataatcacaattgcttctcagttccaccgtaatctcttcccctgaagcgcttacatgacagtcgttctggctcaaaagaattatggaaccaccagcttggtagatatgtaccgtttccgttaaggaaccgtctgaaaagattatgcttccctcacgttttttaccgtcttcgttcatggcaacagtgtaactttttgtcgtggtggacaatgcccgggtactgttgctctcttttatccagtctttgcattcctcaccgatagttgcggtatagctgacattggatttcacttctactgtgacagttcctcccgcttggtccacctcaaacttgtcattggtaagcaggagggcatccttctgtttttgggaaaccacaaagcttttgacttccgcacccgcctttaaagtgactgtcacactgcggtcgtcataggtttcgtttggggttgtggtgacctttatagtgtggctacctgcattcccacttgtaggggcaacggtgcaccaagggactcccctgttccgtgtggaagctacgcttactacccatgcagtgtttgtcgtaaaggagaatgtctgttcgcctgctccttctgtaaaattcatatttccctgctcaaaatcgataatgttctcagattgtttcggggcgttgtcattctctttgctgcaagctgtaaagaatatgcataacggcaacagtatgaataaaatagatatttttttcagtttcatactttttgaatttaatatttcattgtgatattccaataactttcaggttcctgaagagttttatttgttaaattacgaaacttatcgctcgatgtgaatatagatgaatccctattagattttgcgatactctgtgagttcataatcttcataaaagattccgtcttctgtgtatttatctgttgtttcgattattaattgagagtctgttaatgtttttacttttatcaattctgattcgttattgtcggttattgtaattattccattactataactccatttaccttcatcgaaccaatcccatttgtctgtatggtattcagcactcttacatgtcccatcttctttgaaaaccaatttaaaaccaaccaaatcattaccttcatctttgccttcatctacgatctctccgttttccttatactgataagtgcaagatattctttcccaagtacctattaaggcggatgaagattcgggggctttttcgtcatcatcggaacatgcactaaaaccgaaagtcataatagacattaatcccaacaaaaataaaaaataagtttttttcataatacaactaatttttaagtacacctttcagctcctcaaggttttctattaaacacgaagcgtggaactgcatgccacgtctttgagtgaaggtcctgagaaaacctttgatgacagatatggttatagcagcccacgctatatgcgtgagaaccactatgccgttcttgtcatctttgaaaatttctcaggttttcactcgcaagagttcagcataacgcttcttcaaattctaaaatgtcttgaagggagtttcctctcttcaaatgcaaaaatatgaaaaatgtaggaagcgcaataatatttcctgcattttttatgttggcacataagtatttatagtcattacagtttgaatcccttgtttttccgttgcggttgctgtatcgttggccgtatccgtcggagcagcctctcgaactgctccctgaaccagtcgaggatgttctttccgttgatgcgcaggacaaagcgtttccctttctctccctgctctatccccatctgtgcggtgacgtccgtcacggagaggcttttcttgtgctcttcggagtagaggtttccgctgtattccaacggctggaaggtgaaaagccggtccgtctgctcgggcgtgaagcctgccgaacggcagtacccctccatgcgcatcgcgtcggcgaaaagcgggaaccatccgcacgcacgatccgtccatttttgcagatatgccgtccgctccctttccctttccagtttttggatgtagtcggtctgcaccgtggcaagttccctgccgtactgtgcccgctgccgttgcagactggcctgcaagtcctctatgctctcctcgcgggcggctatctcgttctgaaggctgcgattgtccgcctccagctccttgatttttccactgcccaaaagagaacccacctttgctatgatggcggtctttgcctccaccttgaccgcctccagcttttgcgtgttgatttcctttctggccgtttccagccgtttttccgcctcttcctgctcggcttggagttgtcgcacgttcgcttccagttcacccgtctgccgcctcaaatcgcggtaatactgggcggtggagacatgccgggcttccgaacctcttaccccgcgttgcaggtcgtatttcaccatgaccttggcatagtcgtcgtggtaggcaagcagtctggtgcggttcagcacgtcgtcggcacacaatctggcggtattcgccttcttgcggtaggttcgtcctccctccttcggtttcttctgtcccgccttcctgcgctctcccgtcactatcggtacaagtgtggcgtgtatgtgcggcgtgtgctcatccatgtgcagcaccgccgagaccacgttctcccgcccgaaggtcctgtacagccagtccatgctgtcccggcaccagtcgtccagttttccggctttctctatttccatcatgtcctcatgtgttcctgagagcatgacacggatggcgcgtacctggtcgtgggtgattttcctcctgatgcccgcactgctgatgcgggcggcaatcgcatcgtcacgctccctgatgccttcgggcatccggacgagctcgcggttcaggtgcgtgcgcatggggtcgacgttcggcgctatcaccctgcgctcgatatggtcggacatccggctgtcggatgcccccttcgcttttctgaaatcgagtgagaaatatcccattgtaaagtctttttaggtttgacaattccgcctgccgtgcggatatgcctcacggcgaacggggtgtgcagaggggccggcccctcgcctcaatagggcgtttttagctgcgcttgcgctgcgtgaagaaaacgccctattgagctatggcttttcactgtgcaaaaagcctgcgggatgcgtgggttacattccgatgcccttcccctttttcttgcccggctgctgcacccactgtacttgctttgcctgctgtaccgggttcacctgctgtgacaacttttttccgttcaggtagtcgttcaggtccttgtacccgctgtacacaggtgatgcgtcgcggacacgcgaaccgtactctctttggatttcgcgcagggcttccaacccggcgcggtcgttgtcaaggaagcagtgtatccgctcataatcccccagcggccgcagggctttggaaaggttggaaaccgagttcagcacgatatagtcctgtccgttaagggcggggcggtcgggatgcctctcctgccgcagcgtgaggaaggagaggtagtccatgaaaccttcgaagaggcagcaggtttcccccggttccgtttgccgtatgtgggtgatgtctttcggggctatgcatcccttgaagaacttgttgcgtatctcgtagcctcccgaacggttgggaaaaccgacggcaaagtagggtttgccgtcggtcagatagtgcacctccctgcattctctttttgccagttccgtatttatccccctttcccgcagataggagaataaggcgggggaagaaagcggcattacttccaactgccggaagcttggttgtgataatgtctgcccgccaaaagagaaggagacggggcgcacgtgcggtgcctgccttgctatcatttccagaaggtagggcacatggtcggatgcgtagagttccgccgccagtgcgatgatgttgccgcctttcccggtggcaaagtcgtaccagagattacgttcggtgttcaccttgaacgaggcctcggtttcctccctcagcggtgacttgtaccataggttgtcgccctgccgtcttacgggtgagtaccccagactgtgcaggtattcggctatgctgatttgtttcgctgtctgaatgtccatacgtgtaagtgtttgaatgaatgactgtttttgttttttcgcccgcaccttcttatataaggtacggcatatacatggcttcacttaaatgctcgtatatataggatacgggtattaagtgaagcggttgcgtgatgtccgcgtaccgcttcgcttttcccttatatataggcaccgtgaataaagtgaagcgtttttccgcagccgggttaataatggaaatcgggcatgaaggtgtatttcctgccgttctcctgcactatcatccgcttgctccgtagcgtggtgatgagtgataccgccttgtggtggttcagcttcacgccgacggcggcataggcatttatcagcgcgtcctccagttccttgtagccgtattcgcttttcagtgcgaatgccgcctccagagcgatgcggtgctgttgctccgtgatgtgcctgtacgcgtcaaacggctcctgctgcggtcttccggccttcctctcctgcggggcatagttctccaccagttcgggaagtgccctgtcattgatgcggaaggcgaacggctcgaagtccatcgcccggatgtgcatggccgacacccggctgatgtcgctgttgttcttgtccttctccaccagcagcaccgtctcggccttgttgttcagctccgtgccgatatgccctcttgcgttctcgtcgcccttgttctggtgcagtatcgtgtggatgtgtatctggcggtcgtccgtccactgcatcagcttggagatgatgcgtgtggattcgccggggctgttgatgtcgtacaccatgtcgcggatgccgtctatcacgacaagccccagttccggggtgttgtagatggcctgctccacagctgcgatgcgttctttcggggtgtacttgcgaagggcgagaaattcgaggtgctcgctgtcccggtcggtcggcagtcccgccatgcgcaggatgcgttccatcaccttgagacaatgataggggctttgttcggtatcgacatagaggattttccgcttgtccttgggcagttccgccgagtacagcagtaccgtgccgttcttcaacgccgccgcgacgatggcggagacgttgaacgtcttcttgcttttcgccttgccgatggacgcgctgaaattgcccagtgtgccgacgacagtgccgttcgccttcagtatctcgggggccttctcacatttcatgccgatgctcagccgtgaggcctgccagatgatgatggcgttctcacgggtcacttcttctatacgctcgttactttccatggctgcggagttttcgatttgcgcttctggcgatggcgagtgccgcttcgcccttgtcgttcacacgtcttgcgaggctttcagcccatgacagcagctccctgcgggagaacagcagcttgttcccgtacttgcggaacggcacatcccccttggcggtcagcttgtagaggcgggcctttgaaatcaggaacccgtgctgttcgagcacccccacagccgcatccggcgtgaggttgtcgggttcgtttttcggcagggtcagccccgccagtgtctgcgagacgctctcgctcacgattgcccggagttcctcgggcgtggtaagaataatctggttcatgtccttcctttctttttgggtgttttactatggctgtcgtcacagccgttccaaccggttgtggcgcaaaggaagaataaaggaaagcgaatatcaaaccgcaaataacttaacacggatatgacttttatggacgtttcatgactttgggtgacactgcgtggggcgggtaaaaagagaaacggtgcaataggcggacataatcctccaatggcaccgttttgcacacatatgtcaagtgattcggaatgtactattatttcacaccctttaactttccgagttgggaaatgacttcttctattacgaaatatttctctcccggtatcccgatgtcggagcgcgatatgaagcccagctcctcccaccgggctatggtctggcggctcacgcccgccatttttgccagtacgctctggcctatcatctccctgccgaggatggcgggatacctgtacttgcgggtggcgtggctgaaccttatgcgttcgatgaccgcctccacattgtttatggtgggccgtacccgctcctgcacgcgtatcacggcctccgttatctcatatccggcaagcccgggatgtccggaaagctcctcccatatggcaccgaaacatttgaggtgccgtatctttatctctctggtcttctttcttggcatggtcagtcgaatttggtaagtaactgcgcgttcttcatccgttcgtcccgctcgaaactggcaaggtagttctccgttatggcaaggttggagtgccccagactttcggatatgtaggagatgttcgtcccgctgcgcttgagcacggtggcgaacgagtgccgggccgaatacgtggtcacggggggcagccccaccgcctcggctatcctgcccaataccttgttgcatttctgtatgaccgtatcgacaaggtgcttggtggcgaagccgtcttccttccccgtggcgaacttgaagatgagcgtgccggggtttccgtcatcggggttgccccagcggtccatgattttccgcatctcgggagtgagcaccgcacgtatggtacgcacttgcttggaagtgttcatcgtctttgccctgacaaaacagatttcaccgcccacgatgttcccgtaagtaagatagagcatgtcccggaagttgatgccgttgcagaggtaggagaagaaccacatgtcccggtaaagctcggtttcctccctcccgtcggtataggtgacgagcctctttatctgttccagcgtgagtgccagcttcctgccctcggctgagggtatctcgaacctgttcctgccgaacgggaagtgcgcctcctttattatgccgtccgcctttgcccggttcattatcgccttgagcatcttgaaatagacgctgagcgtggacttgcttttcttttggcccgtccagaatcttccgcagcggttcagccagtccaccgtgacggcagaaaacggaatgtctttccctgcaaactcctccaccgccgtcagcagtgcatgatagctgcggtacgtacccgcctgcccgttatgtttcaactcttccgtcttcgcctttatcgcggcgttcactgtcgcggtggagcatctgcccagccggacactcaaaaggtcaaacgcgaaatctccacgttcggcgagtgcctccacctgccccttgatgattgagaagctgttctctatgttcgagcgtgcctccgtgagcctgcggctcttgctttccgcaaggttcgcccaatcctcctttgacagctcctgccccgtggaatagtatttctgcctgcggttgtgtatgacttgtatcttcacggggaacaagccgcttttcttcgccctgcgtgcgtccagtaccgacagcaccgaaattccgtcctttgaatacttgtacataatctgccgtttttgatggttctttacttggtctgtatgcaaatatatgtgcatacgatttgcatacaaaaatagagattatcggaaaacgatgcaaattatttggagagaaaatttgctaaaatacgctataatacagtgatttgcgtatgtaggtaaaatggtggaaaataaataaaaatgggcttattttaactttatgttaacctgctattaaccaggtaaggaaaaaagtctccctacttttgtttcgtcaaagttaaagaaaatattaaaaacaaatagatatgaaaaagcaaaattttatcatcacatcgctatttttattttggattataggaacaaccgctgcacaaaccattaccggaaaggttataaacatccatgcacaagccattgacggtgcaaccgtcatcctacaaaccattgattctactttcgtggacgccgtaatcacagataccaccggttgctttaggttcaaccggcaaccagcatcttatcggctgattttccaacacatcatgtacgaaaccctcttattgacaactacaggagaagacacaggcacgattaccctgaaaagtaaagattatgccctggacgaagttatcgtcaaaggggaacgccctcttgtaaaagtggaagaaggaaaattatcgtatgatctgtcacaactcaccacacatagaatcgtgaacaatgcttatgaaatccttcagcaattacccggtgtacaagaaataaacggcaacctttcattggcaggcgcacacaatctgagcattattctaaacggaagacccacaacaatgagtcacgaacagttagccattttattaaaaaacactccggcttcacgtgtagaaaaggtagaagttatgtatagcacaccgccgcaatatcatataagaggtgctgccatcaacttacttttgaaagtttatcgtccggaagaaagcgggttacaaggagaagttaatgccggatatctatacaattacagaaatggcacacaaggaggaatcagcctactttacaccactcctaaatggaatatagacttgctatataatacccattatgaacaaaacagacaaactacagatacgtactcacaccacaccttaaaaaataatgtatatgatatctgtcaacacaataacattgacagaaaaggaataacacattatgtacggacaggcgctgaatataaattcaatggtagtgctcatatcaatttggcctataccggtatcttcaaccctaacaacgataatcattcgtattccgacgggaacatcacaaccgcagacaatcggacaaaaaaggaggctcaaatgcacaatctcgctttagattatctctctggcttcggtatgaaagctggaataaattatacctcctaccattccgaaagtcatcagcaattcaccaacaaagacaacaaaaaacaaacaagcgaatttcatacgactagcggacaaataatagaccgctggaaaatatacgtagaccagtcacacacactaccacgagagtggaccttgaattatggcacctctttgacttatgccagtgaccataatactcagttctatcatacccaaaacggaacagatatgagcgaacttaacacagacaatcgttataacgaatatacatatgacttctatgtcggattcagcaaaaatatgggagaacgtttgtctttcagcgcatccataaccggagaatactacaaaacggcccgttatcatgcatgggcggcttatcctacagccgaattaacatacgtaatgaccccagcgcatattttacaacttgcattcacttcagataaaacctatcccagctactgggatctgagcgaaagtaccggctatataagtagttatgaagaagtacaaggcaatccaatgttaaagccatccaccgactattccgtaaatctgaattatattttaaagaacaagtatatcttcagcctagcttatgactatgagcccgatttatttcagcaactggcttatcagagtacggaacgcctgacattgatttacaagaccctgaactgggattatcagcaaagtttttcagccactgccatcattcccttcaaaataggccattggctggacagccgtgccacactacaagcagaatacaggcaggcgaaatgtgataaattcttcgacctttctttcaaccacagcaaatggattggattgggaatgttacagaataacctaacgctgtctacccaaccggacatacgcatggaactgaccggactttatttaagcccatccattcagggaaattatgatttaagcaatgtatgggccatccatgccgggttgcgatggaattttgccaaccaaaaggcgagtcttcaactgaaagccactgatctgttcaattcaatgcaaggagatatagatgtaacactgcgcaataaagggcagtatatggacatgcacatcaacagttattcacgcaacgtaactttatcctttacttacaagttcggaggctataaagaaaaacagcataaaccaatagacacttcccgattcaaataaagcatcatcaatagtatcatgacacagtaataaggggcagattcgtacatccgcccctcattcgattatttcataacagaaagtatcttactatattcagactgattattcaatgtctcaatagcttttttcagatcaggatcatctttcaagcgttgcagtatcgcgccacgttggaaatagtaacgtttcaaaatctcctgagcaatagcatcttttatctctttcgagaacctgtccaactcatgatccaaattatgcgtcaatttcgtttccaaagcggcaaactcttcttttgccccatccatatatccttcaaactctgctatttctttcaagttcttcagcatcttctcactttgccgatcataagtaaacttacgcttatgtaacatcttcttaaaatcaacatagtcagcatctgttattgtaaagtctttcacttcccctacctgagaatgcttgatacaatattgggtagcataatcaaaaatcatatcatcattaagcagataaaacataatgtttgggaaattttcaactttcacctccacatccggacgaataccgccaccatcacgcacttcacgtccggctgctgtatggaatacattggtcaggctgtccggagtacgggccacagacccgtcagcattacgtttagcataatcaatagcttgaatgcatcgtccgctgggaatataatattttgcagtagttactttcatgctactgttataaggcaattcacgaggaacctgtaccaaccctttaccatacgtacggcttcctaccacaatagcccggtcaaggtcctgcaaggaacctgaaacaatctcggatgccgaagctgtagaaccgtccactagcacagccagcggaatttctgtatctaccggttcattcgttgttttgtaagtggtaccagcttgtttaatcttgccttttgttaccacaatttctttccctttcggtacaaagaaattcaccacattcaccgcttcccccaacaaaccaccaccattgccacgcaaatcgagaacaatagatttagcaccttgctgtttcaattctatcaatgccttctttatatcttttgaacaattctctatagcaaaagtactgataacgatatatcccacattattgtctactattccataataaggtacagggtttgtacggatggtagaacgggttattttaaattccattggcacgtaagtactatcagaagtaggtctctcaactttcaacacacaagttgttcccggctcaccacgcaaattatcactgacatacgaggtcagatcattgggaattctgtctccctggagcatatcttttccattgatctccatgatgatatcaccagccttcaatcctatttcggctgcagggcttccttcggaaggttcaataatagccacacgctttcggggagtataataacgtattaccgatccgataccgccaaactttccgctagtcatttcctttagtgtattatcttcttcaggataatactccgtgtaagggtcggtctgcgccaacatagcatcaataccatattttatcactttctcaggatcaatagtatcaacataaaacatatccaattccttgaatatcgcattgaagatatccaagttttttgctatttggaaattacggtcatcacctttattaaaactaaacaaagcgccacctgccaggcccacgcaaatcattaacaatattttcttactattccacttcatcactttatgtatttgtgaaccgcaaattaatacattattctattcaagcctgtagaaggacctctatatttaactttatttcgtcccattttttctttgataaggttgtacccaccacttgtatcacattggatgctaaaatagaacctataatggaacacttctccaaagaataaccacaagtcagcccatacagaaaacctgctgcataataatctcccgcaccagtggtatccacgagcttttttaccggaggtacctctagtttgatgcattccgtacctttctttatacatgaaccttgggcacctagttttactattacaacactgcatttagaagcaatttcattaatagccccccaagcatccttgcctgtataagcctttgcctcttcctcattagcaaaaacaatatccacgtatttagttatcaaaatatcgaagaattccaggtccccttccacaatattataactggccatatccaaacagatctgcaatccagcctctttgcctaattgcatagcacgaagaatcaattcgtgatcctgtaccaagtatccttctatatatagatatgcatatcccttaaacatatccaacgtcagattttcggctttcatagtggcagcagctcccaaataagtgccaaaagtacgttctccatccggtgaaatgaaagtagaagccactcctgtaggtaaatcaccggcaagtaatttcatgtcaattccctgcttcaaaccattttttttaaaatattgcccaaaatcatcgtttcctatctttccgataaatcccggatgtgcccctagattagctaatgccaagactgtatttcccacacttccccctgtagctttatgcgttttcatatcagagaatttaccactgattttcagaaatttatcttcatttataagttgcatacttcctttgggcaaactcatctcatctagtagcgaatcatcttgcaaagtaacaagaacgtcaaccaatgcattgcccattccaattattttatccatttatctaaaatttttctgcaaagatattgcatatttcggaaaaacctattatctttgcaccgcatttgagagaaaaaccttcttcgttagctcagtcggttagagcatctgactgttaatcagagggtccttggttcaagtccaagacgaagagcacttttaaagtcaaatgcaattttcttcgttagctcagtcggttagagcatctgactgttaatcagagggtccttggttcaagtccaagacgaagagcacaaaggttcgcagatagcgagccttttttattactatatataataaaagccttcatcacattcttttgtaattccattgtaatctcgggtcagcggattttccgggttggcaagctttcttttaagcgtatagcctagccagtctgaacatgaagaacttcagatcagccacccctcttaactggcttcgaaaagctttgattttagcattgaacgactccgctgaagcatttgtcaatcgttcttcaaaataatttatgatggtcgtactatggtttgaaaaggtatcaagtaccttgttgaactccatatagtcaaacttttccacttcattgtaccatcttgcgagatttagccttgcttcatcgggacctgacttcttgttgaagatgtctgtcagtttcatgctaaggctgtatccttccagaagcttggggaatttatcaaagagaatggcagccctggtcttttgctgttcattccatttgctccagtgtttcagtataatatgcttgcttctgcttactatctgtggcagggtttctccgttctccattctttcaggctcccatttccctattctctccctttccgccttactctttgcttctttcttcttttgacggtgctccctgatagcctgattttccgcatcaagtactttccaccgatagcgtattcttaactggtctacagcttcagacatgagctgctgtacatgaaaacggtcattgatcagctttgcggcaggaaacacctttctgaccgtcagcatcatggctgaagataaatctgtagtgacagtcttgacagacagccgtttccggtgcggaagcctgcgcaagattccgcttaccgcatctgtggccactccacgaaccattgcaactaaagcccccttacggcctttagctgctttattggtcagaatcgtataaacatctccattgctcaggcaagtttcatccaaagaaaggttttctccaatgttttcaggataaaggaggtagtcatgcgcatgttcgagttggtcccagttccggtaatcactgattttctccttgtattgtttacgaagagtctgcccttttacgccataacgttccgcaagcacacagatactcacaggagtagattcaatctccttcttttaaaaaagaaacgaactcagaattcagccgtgtaccgtcaaattcggataaatcccagtcatagctgaagatttcattggaagacttgtcaagccatttacgtttacgaacatggagataagtggcgcgaccacgaataggatagtcttggattgtacggtactcaccaaaaccataggatatgatatccgggttggtcttatcttcttttagctgaacttttttttcatcaagataaatatcaaaacggtcagcactcttgtcgaaattgacaatatcaaagttgtctataagcacatccggaaggatggcacgaaggagtcgttcgggtttcataaaacaaaggtaagcaaaggtagctaattttaaaacttaacaaccagaaatttccgctgagccgtaatctccacccgccattttacttatattaccctcaaaaacaagatttccattcaaatgttttggaactatcttactattatttacatttgttgggaaacaagtgggtcagcggattttccgggttggcaagctttcttttaagcgtatagcctagccagtctgaacatgaagaacttcagatcagccacccctcttaactggcttcgaaaagctttgattttagcattgaacgactccgctgaagcatttgtcaatcgttcttcaaaataatttatgatggtcgtactatggtttgaaaaggtatcaagtaccttgttgaactccatatagtcaaacttttccacttcattgtaccatcttgcgagatttagccttgcttcatcgggacctgacttcttgttgaagatgtctgtcagtttcatgctaaggctgtatccttccagaagcttggggaatttatcaaagagaatggcagccctggtcttttgctgttcattccatttgctccagtgtttcagtataatatgcttgcttctgcttactatctgtggcagggtttctccgttctccattctttcaggctcccatttccctattctctccctttccgccttactctttgcttctttcttcttttgacggtgctccctgatagcctgattttccgcatcaagtactttccaccgatagcgtattcttaactggtctacagcttcagacatgagctgctgtacatgaaaacggtcattgatcagctttgcggcaggaaacacctttctgaccgtcagcatcatggctgaagataaatctgtagtgacagtcttgacagacagccgtttccggtgcggaagcctgcgcaagattccgcttaccgcatctgtggccactccacgaaccattgcaactaaagcccccttacggcctttagctgctttattggtcagaatcgtataaacatctccattgctcaggcaagtttcatccaaagaaaggttttctccaatgttttcaggataaaggaggtagtcatgcgcatgttcgagttggtcccagttccggtaatcactgattttctccttgtattgtttacgaagagtctgcccttttacgccataacgttccgcaagcacacagatactcacaggagtagattcaatctccttcttttaaaaaagaaacgaactcagaattcagccgtgtaccgtcaaattcggataaatcccagtcatagctgaagatttcattggaagacttgtcaagccatttacgtttacgaacatggagataagtggcgcgaccacgaataggatagtcttggattgtacggtactcaccaaaaccataggatcctcaaatccgcaactacgcgcctaatatgatacagaagcgaaaagaatctgcatcgttagtaaaaagggggcacagtgcatcgaatgtcaccataaagacatataaatgccccttaccccaccatgcgacttgaggcaatacgcaaaatcacgactataagttgtcggtgttatccaaagtcattctggaacacattggcataagcattgttgcatgaatagatattcagcacatacttccttgatgtcctgacccatttggctggcacagagatgaacttaaagacaaacgtcttgatgcggcttgttgctttgagtccgaacctcttcacgtcaagcctcgccatgatgaatttatagaagttgcgtatgagtgccataagcagaagaaacaccgtgttttctcccataaaggattttggaagcctgttccagccgaatccgttattcatatcatcgaagatgcgttccttccctccacggaggttatagaattcgacaatctctttctcggaagactcgtagtcatttgtaaggatgcagcggtaggtgtattctccttcccacaggtcgagttcgccgtctatccgcttctgtctttgaatcacaagacggtatgccttccctttccatttctcgatgagaatggaggccagctcaaactcaatgccgcccaattccactttcttccaacctctgagggcaaagatgtcattgtagagcgaactgcatcggttagcacggatatagaaggtcttgcagtgtttagcaatctcttccactatctcttcagaacacgagccgcaatcagctctgaaacggttgataataagcttgttttgttcaaacctttcaaagaacctcttcagcgtgtccttctggtggaaacggacatttgtgttgccgtcgctgttctcaatgccgacaatcaagttgccaataaccgccacgccagggcgataaccaaggaacttcttgtatgtaggcttcgcatcaaacttctcagcctctatgaactggtggtcgaagtcaacgtcatacccctcgccctctttcagctgccctgtggacaataggcaattgaggagcagtgtattcagcttgtctgccgtgttgaagtcgtaggtcttgccagtgtcggatgtgtaggaaatgttatcctgggtcagttcctttatggctctaagaatcgtgtcggcactgcatgtgcgaagtgtcggatgaagcgaaaggtggtacatcagatgagtggtgacatcctcgatgcatgagccgccacaaaaataaacgctcataagcgaacggatgatttcgctgtattgataaccatacagcctgcatctcataccgagggttgagtcgattacagatgagagtctggagtcaaattgctccattattgaaaatattcctccaaaaggagtgagtttctcggatttaattgctacctttgccatgtctgtcgggtttgatacatattttgatttgcaacactaagataggtgaaaaatctgacatggcaaattcctgagcaactttttgttgctcaggtacttaaaaagttatatttgtaatagtgttgcggaattaaggaggatatgatatccgggttggtcttatcttcttttagctgaacttttttttcatcaagataaatatcaaaacggtcagcactcttgtcgaaattgacaatatcaaagttgtctataagcacatccggaaggatggcacgaaggagtcgttcgggtttcataaaacaaaggtaagcaaaggtagctaattttaaaacttaacaaccagaaatttccgctgagccaaacaagtactgatatgaaaacgcacatcatagcactttttctacttataggaggagcattgaatttatttggagaaaacttacataactttttcaaccgatataatttcagctttattacagaagatactgggttaccccataactttatcaatgatatttacaaagacactcaaggatatatctgggtagctactaataatggaataggacggtataacggctatcaatttattcattataattcccagtcccactccattcgcttgaaaaacgactacgtgcataaagtctgtgaggataagtttcaacgactctggatagggtcggaagaaggaatagacctcattgacttgaaacattatacacagatagacacggacaaagaactgcctgccgaattgaaatctctagcaagtaactacattgcatccatctatcgggacaagcagaataatttgtggatatcgacagacaagaatctatggtatctggaactaggcgtagacgggcaaataaaagattactataaactgaaaaaagatacagaatcccccatccacgctgttattgacctgcaagaatacatctgtgcaggcatagataatcatgtatgccgtattgaaaaagggagcaaccacttactgaaaaccagcatggtatcggagctgctgaaacccttctcagaagactggagaattctctgcatggaaactgacggggaattgttatggataggaaccaatcgcggactcttcaagtataaccatacccagcagagtttgaaccggtaccgttactccaatcatcgccccggaatgctaagtcaagcctatataaccggagttaaactgactagcaaaggagatgtcatcgtttccactctgaacggactcaatgtatacaatcgggataccgatacttttacttatatccgccaaaacaatgaaatgcctgacaaatcgttgaactgtaatttcatcaactgcctgctgaccgacaatgagaatatctgggtagggactgagataggaggaatcaatttattgactcccaattgtctgcaaacgtatgtgtggcaatacaactatctgcgagaaacctctctttcccccaatccggtcaatgccatcagcgaagacaaagacggaaatctatgggtaggaacagtagagggaggactcaacaaaaagagcaaaggcagcgatgagttcatccattatacttttgaccagaataatcccacttccattagtaacaactccatccgtggcattctcattgattccgaaaatcatttatgggcatatacttggggggtcggaatcaatgaactaaatctaaatataccccataaccaaactttccaacgccatatccgggaagactccataggattggagggagattttctaagcagcgcctgtgaagacaccatgaacaatggtttatggtttggtactaccagagggcttcatttctaccataaaaagaccaagcgtttcacccgggtcttgtttgaccgttccgacaatgaattcgatgcggtagggtccatcattatcgaccgcaagaaacgtctttggatgggaacatctgaaggagttttcattatggatttatactcgttctccatttcctccacacaattcagctatacctatttaaaacataaactgacggaacccacttcattgcaattagaaaaaataaactgtatcatagaagatcataatggtaccatctggctgggagcaaatggaaacggactatatcaactagcggaagaaaatggaacacagttcacatttcataactacacccgcaaggatgggttacccaataataccattataggtattgtggaagataaaacgggacatctgtggatgtccaccaaccacggcatcgcccaactggatacacaaaccatgactttcaccaattatacaaaagaagacggactgcccaataatcagttttattggaacgcatcttattattctccccaaaataatctgttatatttcggtactataaacggattagtcgctttcacccccgatatagccaagataaaaaagcaggatgccaaagtcaaactgacctcaatcagtgtcgccggtaccatggtctatcctccagcagacggaaaaactccctgcgcggtaacaaatttacataccatccgtctgcacgaaaaagatcatggtttttccatcgagttttccaccttaaactatggaaactgtaaccgagtgaaatatgcctaccgcttgaaaaattatgagaatgaatggacagaaacccttcctggcgaacatactgctagatacaatttcattccctccggaaaatatgtgttccaagtccgtgccacagacgagaaaggacattggtctgataaaataacggaagtcaaagtaaccatcactccttatttctataaatcctggtggttctatttattgcttgccattctgatcaccgtaggcagctattatttttatcaatggaaaataagtctgtaccgtcaacagaaaaaacaactggaaaaagaagtagcccaacgcacccatgagttagagttacaaaataaacaactagaaataatggcacgacacgtcgaggaggtaacggaagaaaaaattgctttcttcaccaatatcactcatgaattccggacaccagtcactttaatcaacggtcccatccaacgcgcccttgacgaaagccatgagccggaagtaaagaaacagctacaaatagctgaacggaattccaattatctgctatcactagtcaatgaattaatggacttcagaaagttagatgcagacaaagttgtattaaataagacaaacgaaaactttatccgccttatacaaaatatattaatgcctttcgaagtatttgcccatgaacggaacataaacatcatcacctacttccggctctgtaccccgttttggatatttgatgttgaatatatgcgcaaagccattattaatctgatatccaatgctgttaaattcactcccgattatggaaaaataagtttgtatgtggcttcccttaccgacaaagacaaccatacctggctgttcatagatataaaagatacaggtaatggtatcgtacccgaagatatagaacgtattttcgaacgcttctaccaatccaaaaagagcatcaaatatcccgtttatggacaaagcagcacaggaatcggactattcttatgtaagaaaatcatttctctacacggaggcaacatctatgcaggaaacaatcccaagcaaggagctttcttcagaatactattacctttggaaaaaggtatcccccaagccgaatcagaaaaagaaaaatatgagcagaatgaacacccactttccattcctgccaatggaaacgagaaaaaggaaaccatcctcattgttgaagataatgcagatatgcgtacttatatttgttccattctcaaaaacaattatcaattaaaagaagcacagaacggtgcagaagctctttacttgattcaaagagaaacgattgatttgattgtcagcgacctgatgatgcccgtcatggacgggaatgaattatcccgccaggtaaaagctaatctggctacttcccacatcccctttctcatgctcactgccctccggtctgaagcccaagaaagaatcagctacgaaataggagtagatgaatatctgtgcaaaccatttgatgaggttattctaaaattacgtatccgaaatatacttgccttacgccagaaatacaaatccatgttctccactagtatgaattgtgaaacattgaatataaacgctagttccaaagacaacacatttatgacatcggcaatcaatttaatgaaagaacattatgccgactcggattataacttagagcgctttatccgcgatatgggatacagcaaaacattagtcaatcagaaattacaatccttaacagggcaatccattggccaatttatgagaaactaccgattaaatgtggcaaaagagactttaaccaaagtcgaatgcaacatttctattgcagaaatcgcatatgctgtaggttttaacgaccccaaatatttcacaaaatgcttcaaagagctgtttggagtacttccaagcgaatattttggaagaaaatagttcactttactattttactccatttgtgcaccatattctcctatagaaagctttgtttcccttacatttgtaaaaaacagaaatgcaaatgtatatccttaattccgcaacactattacaaatataactttttaagtacctgagcaacaaaaagttgctcaggaatttgccatgtcagatttttcacctatcttagtgttgcaaatcaaaatatgtatcaaacccgacagacatggcaaaggtagcaattaaatccgagaaactcactccttttggaggaatattttcaataatggagcaatttgactccagactctcatctgtaatcgactcaaccctcggtatgagatgcaggctgtatggttatcaatacagcgaaatcatccgttcgcttatgagcgtttatttttgtggcggctcatgcatcgaggatgtcaccactcatctgatgtaccacctttcgcttcatccgacacttcgcacatgcagtgccgacacgattcttagagccataaaggaactgacccaggataacatttcctacacatccgacactggcaagacctacgacttcaacacggcagacaagctgaatacactgctcctcaattgcctattgtccacagggcagctgaaagagggcgaggggtatgacgttgacttcgaccaccagttcatagaggctgagaagtttgatgcgaagcctacatacaagaagttccttggttatcgccctggcgtggcggttattggcaacttgattgtcggcattgagaacagcgacggcaacacaaatgtccgtttccaccagaaggacacgctgaagaggttctttgaaaggtttgaacaaaacaagcttattatcaaccgtttcagagctgattgcggctcgtgttctgaagagatagtggaagagattgctaaacactgcaagaccttctatatccgtgctaaccgatgcagttcgctctacaatgacatctttgccctcagaggttggaagaaagtggaattgggcggcattgagtttgagctggcctccattctcatcgagaaatggaaagggaaggcataccgtcttgtgattcaaagacagaagcggatagacggcgaactcgacctgtgggaaggagaatacacctaccgctgcatccttacaaatgactacgagtcttccgagaaagagattgtcgaattctataacctccgtggagggaaggaacgcatcttcgatgatatgaataacggattcggctggaacaggcttccaaaatcctttatgggagaaaacacggtgtttcttctgcttatggcactcatacgcaacttctataaattcatcatggcgaggcttgacgtgaagaggttcggactcaaagcaacaagccgcatcaagacgtttgtctttaagttcatctctgtgccagccaaatgggtcaggacatcaaggaagtatgtgctgaatatctattcatgcaacaatgcttatgccaatgtgttccagaatgactttggataacaccgacaacttatagtcgtgattttgcgtattgcctcaagtcgcatggtggggtaaggggcatttatatgtctttatggtgacattcgatgcactgtgccccctttttactaacgatgcagattcttttcgcttctgtatcatattaggcgcgtagttgcggatttgaggtatatgaaaaacatattcttattattgagctggctgatactactcccctccggtatactggcaaaccctatcaagggaatgctggaaaggatagacaagggagcatcgaacaagttcgtagtcgaactacacaaaagcccgaacgactttttcgagttagaccggaaaggcgacaaggtagtgatacgaggtaacacctatattaatatagcaaccggcatcaactggtacttaaagtatcatgccggaatccatctgtcatggaacggtatgtatgcctcactacccgatgttcttcctcccgtcctccgtaaggaacgccacgaaacaaacctagccctgcgttatgacttcaattactgcacctactcttactccatggcattctgggactggaaacgttgggaaaaggaactggactggatggcactacacggaatcaacctgccgctcgctgccgtaggacatgaatgtgtatggcgtaacctattactccggctggggttttccaaacagcaaatcaataattttattgccggtccggcattccttgcctggtgggaaatgaacaatctggaaggatggggaggccctaatcccgacagttggtatgaacaacaagaagccttgcaaaaaaagatattgcaacgaatgaaagaatggggaatgcaccccgtactgcccggttattcaggtatgatcccctccaagctggatttgggaaagcgtattgatagtgggaaagaagagaaaacggcaagcgacacttcctcggaatccgcccaaagcaccctcaacaaatggaacggattcgaccgaccgggaatcttactgcccgacgaccctaagtttacccggattgccaatctattttacgaagaaaccgaaaaactgtatggaacaagtgactactactccatcgacccttttcatgaagccaaaaacttacctgccgaactagacttcggcaaagccggcagggctattatggacgctatgaaaaaggccaatccgaaagctgtgtgggtggtgcagggatggacagaaaacccacgtccggaaatgatgaaagcgctgaatcccggcgatctgcttatccttgatttatttagcgaatgtcgtcccatgtggggcattccctctatatggaaacgagacaaaggatacgaagaacacaactggttgttctgcctgttggagaatttcggggggaacgtgggcttgcatggaaggatggaccagcttcttcacaatttctacctgaccaagaacaatccactggccgctcagctaaaaggcatcggtctgacgatggaaggcattgaaaataatcccgttatgttcgaactgatgtgcgaacttccttggcgtgcagaaaagtttaccaaagaagaatggatcaaacaatacatccgcgcacgctatggcacagacgatgaatctatccggcaagcttggcagatcctggcaaacggtatctataactgtccggcaggaaacaaccaacaaggtcctcacgaaagtatcttttgtgggcgtccatcgctgaataatttccaagcatccagctggagcaaaatgtgcaactattacgatcccactaccacaacagaagctgcacggttgatggtgagcgtggcagacaaatatcgcggtaataacaactttgaatatgacctggtggacatcacccgacaagccattgccgaccgtgcccgaatagtgtacaattacgctgttgccgactttaaaagcttcgacaaaaaaaattatgccacacacacccgacagttcctagaactgttaatgatgcaagacaagctgctgggcacacgcaaggaattcaaagtcggaaactggattcaacaagcgcgcaatctgggaatcacatctgaagagaaagacctctacgaatggaacgcccgcgtacaaatcaccacatggggaaaccgctgctgcgccgacatcggcaaattacgagattatgcccataaggagtggaacgggctgctgcgcgacttttattacaaacgttgggaaaaatactggcaagtactgcaagaccaactggatggcaaacttcctgtactgccagtaggtaattcatcaacccccactgccgataatccagccatgaccatagattggtatgccctggaagaaccatggacactggcaaagaacacctatgcggcatctgccgaaggtgattgtatagaagtagcgaaagaggctataacattgataaacaattgatagtaagatgaaaaaggaagagctcaatacagaaaccgcacagcaggcaccgcccattaaaaagaggcttttgtcactcgatgcactcaggggcatcactgtagcagggatgattctggtcaacaatgcaggaggcaaagtgtcgtatgcacctttgcaacattctgtatggaacggactgacaccttgtgacttggtttttcctttctttctgttcatcatgggtatttcaacatatatttcattaaacaaattcaatttcaacgtttccctacaagtggtaaccaagatattgaaacgcacatttcttattctatgcatcggatgggcaatcggttggtttgaccatgtatgtgaaggtgacttcctgccttttgtccatctgcgcattcccggggtactgcaacgcattgctttatgttactgtgttatttcttttacagccctatttatgaatcataagttcatccccgcattaacctttatcttactggtaagttacactgtcatattatgcatggggaacggttatgcctgcgatgaaagcaatattttatccattattgacaggcaacttttcggcgaagcgcatctctatcaaaagagcccgattgatccggaaggatttgtaagcactctctctgctatcgcccacacttgtatcggtttttcatatggaaaatggataatacaaagccatcagacagaaaacaaagtactccgtttgttcttgaccggattcattctgataagtatcggctatttattggcagatgcgctgcctttaaataaaagaatatggtctcctacttttgttttggtgacctgcggagcggcttccatgtcacttgccacactaatgtattatatagacataaggaataaacaaaaatggtgccgcttcttcatcatcttcggcgtcaaccccctattcctctatgtattgagcgaagtacttgccattatgatgggaagtaccggatggaaagcggcagcctatgcagccattcattcaggaataaccgacgcctaccttgcctcagccgtctacgccctcgttttcactctgtttttggggggtatcggttatccactatatcttaagaaaatatacatcaaactgtaacaacagattcacaatatatagagaactatacagtattaaacaagaacatattaatcaaaaccaaaattaaattctatgctaaacgtacaatctctaacccaaaggacatttgcacagatagtagtctttgcattactcctattaaacagtacactggcatttgctcaaaatcaagttaacggtattgtcacagacaaaaccggagaaccccttatcggagtgaatgtagtcgaaaaaggtactaccaacggtgttatcactgactttaacggacagtttacactgaatgtagcacaaggaaagacactcgtattctcttacgtgggttacactacccaggaaattacagtaaaaggatcttctttgaagattattatggaagaagattctaaaacattagatgaagttgtggtagtaggttatggcagcatgagtcgtaaggatgtaaccagctccattaccactgtgaaagcagacaaactgaatgtaggagtttattctgaccctggacagttgctgcaaggtaaagtccctggtttgacggtagtacaaagcagcgatccgacttctggtactgcttctatctctttacgtggggcttcttctctgcgtaccggtgcggcaatggaaccttattatgttattgacggtattcccggtatgtcattaagtctgattgctcccgaagatattgaaagcattgacgtacttcgtgacgcttctgcaacggctatttatggctccaaggctgctaacggtgtaatcttgattaccaccaaaaaaggtagtaaaagtgagcacacttctgtaaactacagcgcatatcttgcatttgacaacattgccaagcgtttagatatgatgactgccgacgaactccgcacctatgccaaggaaaataacatcactcttccgaatgacaaaggagcaaacaccaattggaacgatgaagtactgcgcacagcaatcagtcataaccataacgtttctatcaatggcggttcagaaaagactcaatacagtgccagcatgagttatcaaaacaaacaaggtatcgtacgtggtacagatttcgagcgtttcggcggccgcgcatttttgcaaaccaaagcactgaatgatcggctcaccttagcctttaacgtgaatgccgcacaatcaaaaggtaccaccgttgattccgccaaagatggccaatccgtattcgacgccatgaattattattctccactagttcctgtcaccaacgcagacggttcttggtatagcgacaaaactatctcccaaaacttcaatcctgtatccatgatcaatgaagatacttttgaaaacaacaagaaactccttcaaggaacagccaaaggtactttagatatcactaaggacttaaaatggaacttaagtctttcctatcaagacgaacaatatatatggaacgaataccataccagcaaatcccaatataacacccgaaatggcgaagctaaacgtattgcaacagaaaacaagaaaaaaattcttgaaacatacataaactatgatcatacattcgccaatatccacaaactgggcctgatggccggttattcatgggaacagaatgatgacaatgacagtttcggtctggatgtctacgacttttacaatgataacaccactttttataatctgaaccttgccaataaaatggattggcagaatggcggtatcaccagcaataataacggtcatttggaaactttacgtatgatctcattttatggacgtatcaactactccttcaacagcaaatacctgcttcaagcaacaattcgccgtgacggctcctctgcctttggaaagaacaaccgttggggaacttttccatctgcatcgttggcatggcgtatgagcgaagaaaagttcatcaaagatttaaatgttttcgatgacttgaagttccgtgttggttatggtgttagtggtaactcactcggattcggagcttattcggctatccagacttacagtacttcaggttggttcaactatacaaacgccaatggcacacagaatagttaccataccctggcagccgcctcaaatgccaatccagacctaaaatgggaacgtacagccatgttgaacatcgggctggacttcagcttctttggaggcagattaggaggaaccatcgaatactatgacaagcgtaccagcgacctgatatacacttacgaggtttccacaaaccgctatcctttcggaaccatgccggccaatgtgggagatatcagcaataaaggtattgaatttaccattaatgccactcccatacaaacaaaaaatttctcttggcaaaccagtttgaacttatctcataataaaaataacgtagaaagtatatccaacagcgaatattccgtagattatatccgtgcagccgatcctgaaatcgcaggttattcttcaaatgcagacgtacagcgcatcatggaaggacatcctatcggcaccttctacacctacgaatgggccggctacaataaccaaggagtatccatcttttatgtacacgatcctgaaacgggtgaacgtacaggcgaaacgaccacagatcctgaaacagacagagaccgtactattatcggttgcgcacaacctgacttaaatttaggctggagcaataacttccaatacaagaactggaatctcgatttattctttactggtgtttttggacaagatatctacaacgccactgcagaacaatactctaatgtttcttttgtgaaagaaggccgcaatgtattaaaaagcgtagctaccaaacaccgtgctactgacacacaatctcaagcaccatccaatcgctggatagagaacggtagttatttccgtctgtcctcagtctcattgggatatactttcggcaaaattggtaactggataaactcgctcaagctatacgccacttgtaataatgtattcaccattaccggttactccggccgtgatccggaaatcaaccttggaggcttggaaccgggcatggacagacgtaccaattactatccgcgtacccgttcatttatgatcggtctaaacgtgaacttctaaccatataattgaaaactgatatgaaaaataacataaaattaacaacctggctggtaggtagtctgcttaccttctccgcctgcacagatctaaatgtggatcttaagtccacttataccgaatacccggattccgaaattgccaaggaagctaaaatggcaggtttgtattatggattcggcggagcattaggacgtcgttatatggaagctgccctgctgtcttccgatgagttcatggcagtaacatttggtggtaactggtatgatggcggcaactatatccattcctctcttcacgccagccttccaggcgacgcacacgtggactgggctggtgatattccggctgcaatcacaaaatgcaaccaagcaatttttgacttgggtggagaagatgaaaacaatgccgaacaggaagccttgattgctccggcacttgccatgcgtgctttctatcattttatttttatggatacattcggagcaactcccaaattagaccacttgatcggcgattctgaagctatcgaccgttctccccgttccgaaattacaaaatttatcgaaagcgacctgctccgtgctttggcttctggcggtttaaaagaagatgttgatgcttccacttatggcaaaccaaccaaatggatggctgaggctctccttgccaaactctatataaactgggctgtttatacctgtgatgatgtagctacttatgatccaagcatgactaattccaaattgaatgatgtcataaaatattgcgatgatatcatcgcctccggtcatttcgatctcagtgatggttatcgcaagaaattcatgccagacaacggctatcagattaaggatttcatctatgcaatgccataccaaaataatgaaacatcaaccagagccaatacttacgcccgtttccaattctggcctaaattcaacaatgatggtgcggacggtaaaggactgttcggcataacactatcccaaaatgccggaggcattttcatcgttactcccgaggcggcagaccgtttttgcctggaaggagatgaacgcaatgagatcatcatgaaaggtgcgatcaactattatgacatcagcacacatacaatgggaacagaaccttatatatacaacggacaacaagttgtcctcaccaagaacatcaccatcttgaatgaccaaatggatcttggaaatgacttgaacgcatggtgccagggataccgatgcatcaaatgggctattcaagcagacgattataacctctataaccgcaatcaaagcaatgatgtacctatcttccgttatgcagatattctgctgatgaaagcagaagctattctacggggggcaacagccactaacggcgacacgccacaatccctattcaaccaaatacgcagctattgtaacgctccattattagagcatactccttcattaaacgagttacttgaagagcgtggccgtgaattttatgcagagacatggcgacgtaatgatctaatccgttttggaaagttcgaagacgactggggatataaaaatcaatatcatccggaagctcaaaccgaaaaatggcgtaggatcttccctgtatctgtcggcttgatgaattcaaacaccaactggaagcaaaattatggttattaataaattaaataagtttttataagggcttgttacagcaagctcttataaaaacctttaaagcaaaaaataattcatgaaacttcatcaaatcttattgcttcatattgcgacatctatcttggcattattcccatctcctatatatgcccaaaaaatgatgtaccaggactctatcgaaatcgtagtacacagaggagcgaaccatatagcgccggaaaacaccattccatcagctctagctgcattggaacatggagccggctggatagaagtggatgtgcgcaaaagtaaagacaatatactttataatctgcacgatgaaactttggaccgtactaccaacggtaaaggtcccattcaagatatgctatccaaagatattgaaaaattagacgccggcagttggttcagttctcgatttaccggcattcacgtaccccgtatagccgaaatgctagacaccctacaaggaaaggcacacattttttttgatgtaaaacgaggaactccgataaaagatttggttatattagtacgccaaaaaggatatgaaaataaaagcttcttctggtttgcagactctgaaatgctgaaagaatttatcagaatcgctccggaaatgaagattaaagtaaatgcctccaatatagtggctctgaagaaatggatgaaaatatgcaccccggcctatgtagaaacagatatcctcaatatcacccctcaattcaaagaattctgcaaaagcaatcatatcaagataatggctgctattcagaatgcgagtgaaaaagaatataaaaaagcgattgaagcccatcccgatttagtcaatctggaccggccggaactctttataaaaatgctccgtcaggagattaaaaaataacccttttccaagaagagccatgaaaagtaccctatcttatctgctgattctatgtagcctgttcatgtcttgcaccggacatcaggaagaatccctattgtcctatgtagatacccgtacgggaactgcaccgagcataacccataccgcaggacttttcggcaaaaataccgaagagtacggacagacgctgcctgccgtcctagagcccaacggaatgaacttttggactccccagacacaagatacagaaataaaatgcaaggctccctattattacaaagataagaagatacaggggttccgcaattcacattggattgtcggagggtgtacacaagattacggttccatgaccttgatgcctgtatcgggtacactgaaatatctcccccaagaccgaggaagcctgttctctcaccaagaagaaacagcaacgcctgcctattactccgtccttctcaaagattattccatttttgcagaaatgaccggacgttcccgttcagccattttccgattcacttataaccaaccggaagatgcttatctcatagtcaatcctaacagcgatgaaggagaaggatatattgaaatcgatactataaaaaaacagatacgcggatacaatcccgtacaccgtatctatcaaggctggggagcccccgccggatacaacgggtactttgtcattgaatatcaaaatgaaatagaggaatatggtacattccggcatgacagtctcttcgccggacaacgacagatagccgatggaacaggtataggtgcatatctccggttcaaaatacacccagaagaacccgtattaatcaaagccgcttcctcttttactgacatggaaggcgctcaaaagaatctggacaccgagatacctcattgggattttgaccgcacccggcaggaactgaactccatctgggaacaaaggctttcacaagttacagtacagacaaacaaccgaaacgataaagagaaattttacggagcactctaccgtgcctcattcctgccacgtacattcaatgatgtagacgggcgctacccttctttctccacaggacacccgttcagacaatcagccaacggtagaaattactatgaagattacagtatgtgggatacttaccgtgctctccatccgttaatcaatatcctgaccccaaagaaagccggagacatgatgcaatcattggtggacaaatatgaacaaagtggctggctgcctatattcccttgttggaacagttataccgcagccatgataggcgatcattgcatctccgcactgggagatgcctatatcaaaggaatccgtaattttgatatcaacaaagcttgcgaaggaatgctccggaacgcattcaagaccccctccacctatgaagaatacaaaaacggaatgggacgacgcgccttgaattcttatctgaaatatggatacattcctttggaagacagcgtaccggaagcctttcacacctgcgaacaagtatcacgtactttagaatatgcatacgatgatttcgtattggcccaagttctgcaaaagttggaaacatcagatgataactttcctgatccacaaaaaacagaactttatgatacactaatgatacgtgcacgatattaccgtaacgtaataaaccctggcaccggatatgcccaaggcagatacgctgacggcagtttcctcagcgataccggtaacgctttttccttcactcgcttcatcaccgaaggagctccctgccattatacttggtatgccccccatgatgtatacggactgatggaatgtatgggtggaaaagaaaaatacatcgccaaactggactccatgttcagcgaacaccgctactggcacggcaacgaaccttgccaccagatagcctacctcttcaactatgccggacagccttggaaaacccaacgcgaggtgcgtcatattatggaaacagaatatctgaatgctcccggtggactgtcaggtaatgatgacgcagggcaaatgtctgcctggtatgtattttctgctatgggattctatccggtatgtcccggtacaccttattatataataggaagtccttcttttccccggatgagcatctgtttggaaaatggaaagacgttcaccatactggcccacaacgctaatgaaaagaatgtatacatccagtcggcgcgcctgaacggaaaagagtatgacaagaattactttacacatcaggatatagtacagggaggaacgttagagttccagatgggaccgaatccgaacccgaactggggagcatctaccctcagcctacctccagagacaatgaaataaacgtcaaaaataaaaaaacatagatatgaagaaacaacctattatcagcctcttatgctgctttctgttattcgtagcaggatgcagcaccccccatcagggaaatacgtatgacattatagcctttggagccaaaggagatggcaaaacagatgatgccgccgctatacaacgcgccatcaatgcctgttccgctgccggtggaggaaccgtaatcattcctgccggacacacctttctatgtggcccactgcaactggcatcctatgtgaatctccatttggaacccaactcccgattgctggccaaccccgatgaaagcatctatacagaaagcgcattccgcgaaaaccgtggcgaaggaatgatgtggatcagtggaaaagacttaaaacaaatatccattaccggtacaggagaaatagacggaaacggaatcgccttcatgggcaaagagctggatgattcctacgagctgaagcccgtcactgattttgacccacgcccacatgtgcttacccttatcaatgtagagaagaccgttatccgtgacatcacgatccggaacagcgcctattggacaatacacctgataggctgttacgatgccttgattgacggcatctctttattgaataatctaaaaatacgcaacggtgacggtattgatgtggatcactccaaaaaagtacgtatagcgaactgcttcattgaatcgggcgatgactgcatttgcctgaagaatcgtcgggaatttgaagaatatggctcttgcgaagatattgtagtgactaattgtgtcatgacttcacgctcatgcgctattaagataggctcggaaaatatggacaagattgataatgtattattcaataattgcattatcaaaaacagcaaccggggcatcggcatacaaaaccgggatgaaggtactgtgagcaatgtcattttctccaatatattagtagactgtatgttctattctgatgtatggtggggtaaagcggaacctatctatgtcacctcataccctcgtgccgtaggcaatcataaagatgcaggctggcgtttccccaaaggtgcaacgaaaggacactcgggagaagtcagcaacattttcttcaatcagattaaatgcactagtgaaaacggcattttcgtagggggagacactccggagaaggtgcaccatatctattttgatgaaatagatgtcaagttgttaaaacgtaccggttatgaaggcggtgtgtatgacaaacgtccttgtaacggagatggttttgtatatgacaagacttatgctttctatctggacaccgcttcggatattcggattaccggctgtaacatttattgggccttccctcaattgacacaagccggaggagatatcaaagagaagaatacaatacgtgtaaaaataaacaagaaataattatgacccacattccattcaaagtttctttgttaagactggtcttcctgctgctgcccgtgacggtcgcggcacaggaagccagactttctgattacgtagatcccagaatcggttcggaaggactgggacgggtatttatcggcccctcctgcccttatggtatggtgaaaccatcgcccgattgcactgtccatcccaatagtggttggctgcctatgcccgaacaagttaacgggttctcccaagtacacgtcagcgggacaggaggaggtcctaaatatggcaacatacttgtcatgccttttggcaaaggtatggatcagctcaatcatatagactatcgcaaagatgaaacaatccgcttgggctattatgctaccgaattccagagaacaggcatatatactgaaataacaactgctccacgcgcctcattctaccgattcacctatcccgaagattccttaaaatccctgttggttgacgccggcttcttcctgggtgaacaaccgacccccgatgcccgcgaagcacaacaatttgtaggttcggaaattcaaatcatatccgatcacgaagtaatgggatatacccgtattcgcggaggttggaataacggacgtgcctacaccgtttatttttatgcagtaaccgaccatccctttgtacaaacggccacatggaaaggaagccagatcagcaatgaacgataccagccagactcccaacaaaaaaccggagctttgttgcgtttcccttcttctgcaaataccattcaactgaaagtcggaatttcatttatcagttctctcaaagccagagagaatgtatggaacgaaatacctcattggtcatttgaggacacccggcaagccttattggcacaatgggaaaacttattgcaacgcattgatatagcctcaaatacacccgaaaaatataagcgtatgttttataccggtatctatcataccatgttaatgcctgtagaccgtaccggtgaaaatccattatggagtgatccggaaccttattatgatgatttttatgctatctgggacacctaccgcacctcaactccacttatcacactgattgaccctcaaagagaaacagacattgtacgttcactgatcaatatctataaacgggacggctacatgcctgatgcacgaagcggaaattgtaacggacggacacaaggcggctccaacgccgaaattgttatagccgatgcatttgtaaaaggactaccaaacatagattaccatctggctttggaagctatgctgaaagatgcgaccataccgcccggaggtaacgaagaagcggagggaagaggcggactgattccttatctggaattgggatatattccatacggtattccccgagccggaaaccgcacaatagaatactcctattgtgattataccatagccttagtagcaaaaggactaggcaagacagacttgtaccagcaatacttgaaacaatcttccaactggaagaacttgtggcgggccgattatgaacatgcaggagtcaaaggattcatacttccccgggataaagaaggaaactggttagacaaaatacctttcggaaactcccatatccagaaacccaccttcacatatactcccgttacctttgaaggtccttggtatactccttggtggaacatgttcttttatgaagcctcctcctgggaatattcactcagcattccgcatgacgtacccggactcattgaacaatgtggcggaaaagagaagtttgacgaacggctggatattttctttgacaagggtttcttcaatgtgaataatgaaccctccttcctcactccctgcctataccactgggtagggcgtccggataaaagcggcgaccgcatccatgaaattatccagaagaactataatgacggttctgccggtcttcccggaaatgatgactccggagccatgtcatcgtggttggtattccacatgatggggttgtaccccaatgccggacaagactattatttaatccatacccctctactgacagagagtcgtttccatttacaggaaggcaaaacattcacgatcaaagccgaagggctttccgaaaagaacaagtatatccggtcgatattattaaatggaaagaattatccatattccgccatccgccataatgatatcatcaaaggaggcgagttggttttaaaaatgggccccagtcccggtaactgggggagcaagctatttcctgaacctaaagagtaacatacgatgaagaaaaaactttttatatgctttctgcttatcggcaacctgatgggaaatgtaatggcacaagatatcattaccaaccctctgttatttgtattcaaactgcatggacaaacccgaaagtaccaatttactttcaatcagtccaacgacaccctttatctgcattggggaattgaaagaaacacccgatggcaatcaggcagctacgccatgccccaagaagctttaaaaacggcggtcagactaagcttcttacagccggaagacggacagcatatctgtctctccattcaagaaacctttgccctactttcagcaaccgcttttcaggaattgaaaagccaaaaggcatttcattataatcagacagaataccaactggctgataccaagtcacaagctatgggctattccttactgcatgtaaacgactcagtagacggatgcgaaatgtggattatggataatccggatttccctctgatatgggaaatacaaaataatccgctcggcatcaattggaaagtagctcccatagctctccccgcacacaatctgaaagaagaaatcatccaaagcccggaaaaaatgggcagcatctattatgcttatcccacaccaaacggcatacaaactccggtacccgaaggttacagtcctttctacgtcagccattacggacgccatgggtcccgctggatgacttcggacgaacgttatctagaagtcattcgtgtttttgatacgtttcacaataaatcaggacttaccgatttaggtgaagatgtgaggctcagactccagaaagtatgggaaaatgcccgtgggcgcggaggaaacctgaccccattaggagaacgacaacataaagccattgccaaacggctttatcaacaatatccccatatattccgggacagcgccaacatatcagcacgttcgagcgtttccgtacgttgtatcatgagcatgtccgcattcacagaacaactgaaagaactaaacccctccctccagatcacccgcgaagccaaccaaagacacatggactacattgcctatacttcacccgaagccgaaaagctgggttcggcaagtgcgccatggagaacagctttccatacattcgaagaaaatcatattcatccggaacgtttaatcacttcacttttcaaaaatcccaaagaagtcaggaatccccgtgagctcatgatgggactttattggattgcttccgacatgcaagatgtagagttgcctctatccttttatgatttgtttgaaaaagaagaattattcggtatctggcagtctgtgaattatcggatgtatatttgcaatgccaatgctcccgtcaatcagggagcagcccccgagagtgcaaaatctttattgaagaatattatagaaagtgccgaccgcgccatccgtgaaggaactccttgcgccaccctccgtttcggacatgataccaacctgatccgtctgttggcactcatgcaagtagaaggatgctccaatcaagaaacagatcccgaccgatattacctggcctggcaagatttccgtgtttcacctatgggagccaaccttcaattaatctttttcaagaataaacaaggagaagttattgtaaaattgctacataatgaaaatgaagtcaaattacccattgacagccctattgctccttattataaatgggaaacggtgaaagcattctacaatcatttataaacatacaaattgagaaacagcaactttccttcaaagtccaatctccctattaactaaggcttttcttgcctacaattaagccttttcttacggttacctactacagactccctcaatggaccgtagagtccattgcagcagactgtatagtccacccaagcagaccttacagtccactggcggagtctgtagcagatgactgtaaaaaaaagcttaactatatggaagaaacggcttacacaaccactctattccggttttatctttttcagataatcagaaggagccataccgaattcatctttaaaacactgacggaaatagaccgtactgttaattcccaccttgaatgcaacctctgaaatattgtatttcccttctaataacagacgttccgcatattgcatctttattttgcggatatattcattggtggaaagtccggtcaatgccttcatcttccgatatagggtagaattactcatacacatggcgtccgacaaataaccgatatcaattttctcagaagaaagacgatcttcaatcagcttgttaatcttctcaaggaactcattatccaatttattcatagactcagttactgccgcacgtttgtcaatgagtatggaattcgtattaaaacgctctgccaacaacttgcgggattcaagcaaattatggatacggctatgcaacaaagtagcactgaaaggctttgtcagataagagtcagcacctacttgatacccttcttccttatcttgcaaagaatcctttgccgtcagcaaaataatgggaatatggctggtacgcaagtcttctttcaatttccggcacatcacgataccgttcatcaccggcatcatgatatcactgactataatatcaggaatgcagcccaacgcttgttccaaaccttgttcaccattggcggcagtcctcacttcaaaatcgtccgagaaagattctacaatataatcacagatgtccctattatcttccactatcagcagaatacgcttaccactatgcacaggttctatattttcttctttttcgtccttttcatcggaagttttctccgtcgagtcagcatgcagcacatgaggatacgtgttatccgtcagcagactgacataaaaagtacttcccacattcaaagaactttcaaccctgatctccccctcatgcaaaactaccaggttctttaccagagccagaccaatacctgttcctgaagcctgatgttcgcttccctcttgataataacggtcaaaaatatgaggcaatgcatcgggagcaataccgaaaccggtgtcactcacactgatttccgtatggtgtatattattccggaccacctgatgtaatcctaaagttatagttcctttctctgtatattttatagcattggagatcaaattatccagtataattgttactacctccttatcaaaaaacaaagacatatcttcctgctcaatctcaagacagaaatcaatctcaggtttccggttcaattccttatacttcagtccgatctcgtgtacaagggctgccagattgtcacgacttacacataatttcttgttttgggtttccgtttttctgaactccagtatctgattaatcaggttcaacaaccggatggcgctttgatggataaccgatattttctgtgaatctttccctgataaagaattacttttctgcatatcttccaacggtcccagaatcaacgtcaaaggggtacgcaactcatgtgtgatattggtatagaaacgtaaacgctcattattcagctcctgttcctgctcatgatttttcttctccaactcatagagagactccatatccagtttctttttataggcatgaagaataaaatacaggacagaaacacccgaaagaatataaaataacttggcccaccacgtaagccatacaggcgggtcaatacggatatccagagaagctatctcatccgcccattcctgattccgtattcttgtctttacctgaaaacaataatttcccggaggtatattacggaaagtcacattattaggatcggttactgtataccatgaattttccaaccctttcaacatataagcatattccacttgatcggccaaggcataattctgtatattgaaggtgacgctgaagttattttgcatatagcttaaacgtactgcaggacatccatgaagttctatcatcttttcctcactttttctttccgatattggtacaaatattctcaagcctgtcataatagctgaaggagcttcacgctttgccaataccatttcaggattaaaacgacataatccatttaaagagccaaagtaaatattgccatcataatcatgagtaacactaccactcataaaaccaacaataggaactccatcccatcgcccataattataaaagctattcttaaccgcaatatagcaacttatccctttatttgtactacaccaaatacgcccggaagcatcttccataatagcacgtatatgggcattctccaaaccatctcctcttttaaacacctggtacttcatattgtttggagaaggaaagcatactaacccttcaccagtagctacccatatacgcttcttactatctccataaatactattaattgtatttgaagggaattgctctgccgtataaaaatgtttaatcattttaaagtctggcgaatatactaaaactccacctccaaatgtacctacccaaagaaagccttgctcgtctttaaagagacaacgtacttgttcattctctatataatgctcccaaaaaagttgtccatccaatcctgctttataaaccccttcactagtacctatccatatggtatgatgatcatcctcataaatagcacgaacatcaatcaaagctttatctttagagaatacttgacgaaaatacttctgagttctattatagtaacatagcccaccattaaatagtccaaaccataaattccctttcgtatcacataaagatgcttgaacaggatttccattcaaatctccatcatccgctccatatatagcgactcttttcccttttgaaaaaacattaatatcacctccattggtaccgatccataatactccatcttggtctacacaaaccgtgctaatcattttgtctgttaaatttctctctgctgttggaataggagaataattataaacattaaataaagaagaatcacggcttaagaagttaattcctccaccccatgtacctgcccatatattattaaaagaatcttgaaacaagcaacgaacgctagaactagacagaccatattcatcattacttgcttttatataattaaatcgtacatcttccgaagacacaaataaccgttgcgttaaatccaatacagcaattcccccaaattctgtagcaagccaaagcctattatcatccatctgcctaatatcaaatacaacatgttttccccctttagtctctttaaagtgaataaaactttctgattccggattgaacaaagccagcccttcggaggttcccaaccaaatattattatttctatccttataaatacagacaactccatcccctggcaaactattaggatcgttagggttatgcctaaaattctttgcttttttatcttttatagaaattatactaaatccatgaaaagcatgagccacatacagattaccatctcccccatcaacaactgaccatacattattactccccagtccaggtacagtttctgtattataatgtataaaatttccagtcttcttatctaaataatcaattccattccaatacgtagttatccatagatttccatcagatgcaggctttatgctggtcacatcgtcagtaatcaaactattatgatctccaggatcatgtttataaatagtgaaagtattattactataattataagcattcaatcccgcacgttgcgtaccaatccataatatagaatctataggatcatctaacaaacaatttagttcattgcctgtaatatgtaatttatcaggaatatccttataataggagataaaatgtaccccatcaaatttatttaatccttcttctgtagcaaaccataaatagccttgtttatcttgagcaatactcaatacattattattagacaatccttccattgctcccagctttttaactgagtatgattgtgcccatatacattccggtaacaccaataacaacaaaacaagtatatttttcataatactaaatatcgttttttaattgattattcaaaaatacaaagaaaatacatatttaagatatctaaatcatgcattgcatgatttactatccatttctgcaagattcatataactttattaattttccttcacctatatttgcagtcggaaaacaaaataagaaacaatgtttaatctttaaatcctaattttatgaggcatttaaaatttttatgcacatgtgtcatactactactcacatcagtagcagtatttgcacaaacgcaaatcacaggacatgtagctgatatgaaaggagaagctatcattggagctaatgtcacccttaaaggaaccacaaatggaactatcacagattttgacggtcactttacactcaatgtaaatgaccccaacggaatactagcagtttcatttattggttacaaaacaaaagaagtgaaaattggagaaaaaaccatttttcagattattcttgaagaggacactgaaactttagacgaagtcgtagtagtaggttatggtacacaaacaaagaaaagtttaacaggagcagttagtgacgttaaatccgatgcactaacccgttcagtttctaccactactgccggagctttatctgggaaaatagcaggaatttccacacgcgcagtggatgctcgaccaggtagaggaatcaatcttgaaatccgtaatatgggaagtcctctatttgttatagatggtattccttatggaggtatgaacagtcgtgactggttacaagcatcagatgtatccggcaatgatgtttttaatgcactaaatattgaagacattgaaagtattaccgtattaaaagatgcctctgctgccatctacggtctgcgtgcagccaatggtgtagttttagttacaaccaaaaaaggaaggaaaaacgaaaaagtcagcatcaatgttaatggatattatggctggcaaaacttaactcgctttcccaaattagctaatgccggacaatatgtgagaggcttggctgaagctgcacagaacagaggtgaagatcctaataatctttatactccagaagaattagccaaatggcaagctggtaccgagccgggatataaaagttatgattattatgacatggtaatgagaaagaatgtaccacagtatcacatcaatgctaatgttacgggtggctcagataaaacaaattattatctttctgttgctcataccagtcaagatgccatgatgcgagactttaaatatcaacgtactaacttccaattaaatcttgattccaaaattacagatcatttcactgtaggtgcacaaattagtggaaaatatgaaaaaagtgaagatgtaggtctacctggtggagacggatattatacggctattttagcaatgtttaagatgcaacctatcgaaagtccatacgctaatgataacccggaatatattaacaatgtgcatgaaaatggttataatccggctgcatttagacgtgacattgccggctacaaagacaatttaacccgtaatgctaatatcaatgcttatgcacaatatgatttcaaatttggtttaacagcaaaggccactttctcctacaattatacaaacagtcgttttgacggttatcaatacgcatatcaaatctatacatatgataaagcaaatgacacctataatgggacaccagccacaggacgatggagaaatcagatagatcgtagtgtaccggcacgttatatgcaactacaattgaactatacaaaacagtttaaaaaacataatatttcagcagtcttaggctatgaagcttctgattatgactggagtaagaaaacttatggaacggaaccttccactgactatctgccattattgcaatttgatgaactcaatagttttggtgatgaatggagttatgaagcacgtgccggttggattgggcgtatcaattataatttcgcccacaaatacttaatcgaaatattagcccgctatgacggttcatatctatatgcaccaagcaagcgctggggatttttccctggagtatcagtaggttggagaatatcagaagaaaaattcttcgaaaaagttaaggtcatagatgatctgaaaatacgcgcatctatcggtcaaactggtacagaaaaagatgtaaagctatttgactacttaagtggttacaactggaatcaaggtaatgctgtattagacggtgaagttgtatccggacttaatcaaagaggattgcctgtgacaaatttatcttggacaaaaaatacaacatcaaatattggttttgacttgaccatatttaacagccggctaaaaattacagcagatgcattccgaaaagatattactggcgtgccagcagctcgttatgatgtattgctgcctaatgaagtaggttacaaattacctaacgagaacctaaataaacaagcatatatcggtgcagaagcaatggctacttggactgatcatatcggtgatttgaattataccattagtggcaattttacattctcacgctataaaagtatcgaaacttataagcctcgtttcaataattcctgggatgaatatcgtaattctgcagaaggacgttggggaggcatatattggggatatcaagtaattgggcaattccaatcggaagaagaaatacttaaccttaattccgcaacactattacaaatataactttttaagtacctgagcaacaaaaagttgctcaggaatttgccatgtcagatttttcacctatcttagtgttgcaaatcaaaatatgtatcaaacccgacagacatggcaaaggtagcaattaaatccgagaaactcactccttttggaggaatattttcaataatggagcaatttgactccagactctcatctgtaatcgactcaaccctcggtatgagatgcaggctgtatggttatcaatacagcgaaatcatccgttcgcttatgagcgtttatttttgtggcggctcatgcatcgaggatgtcaccactcatctgatgtaccacctttcgcttcatccgacacttcgcacatgcagtgccgacacgattcttagagccataaaggaactgacccaggataacatttcctacacatccgacactggcaagacctacgacttcaacacggcagacaagctgaatacactgctcctcaattgcctattgtccacagggcagctgaaagagggcgaggggtatgacgttgacttcgaccaccagttcatagaggctgagaagtttgatgcgaagcctacatacaagaagttccttggttatcgccctggcgtggcggttattggcaacttgattgtcggcattgagaacagcgacggcaacacaaatgtccgtttccaccagaaggacacgctgaagaggttctttgaaaggtttgaacaaaacaagcttattatcaaccgtttcagagctgattgcggctcgtgttctgaagagatagtggaagagattgctaaacactgcaagaccttctatatccgtgctaaccgatgcagttcgctctacaatgacatctttgccctcagaggttggaagaaagtggaattgggcggcattgagtttgagctggcctccattctcatcgagaaatggaaagggaaggcataccgtcttgtgattcaaagacagaagcggatagacggcgaactcgacctgtgggaaggagaatacacctaccgctgcatccttacaaatgactacgagtcttccgagaaagagattgtcgaattctataacctccgtggagggaaggaacgcatcttcgatgatatgaataacggattcggctggaacaggcttccaaaatcctttatgggagaaaacacggtgtttcttctgcttatggcactcatacgcaacttctataaattcatcatggcgaggcttgacgtgaagaggttcggactcaaagcaacaagccgcatcaagacgtttgtctttaagttcatctctgtgccagccaaatgggtcaggacatcaaggaagtatgtgctgaatatctattcatgcaacaatgcttatgccaatgtgttccagaatgactttggataacaccgacaacttatagtcgtgattttgcgtattgcctcaagtcgcatggtggggtaaggggcatttatatgtctttatggtgacattcgatgcactgtgccccctttttactaacgatgcagattcttttcgcttctgtatcatattaggcgcgtagttgcggatttgaggcttaactatccggttaacttagacggacaaaataatcggacactactccctggtgatcttatttacaaagacgtaaatggtgatggcattatcaacggtatggatgaacgccctataggttaccccgaaggttgggctcctatcatatcattcggcggtaatatcggtttagaatggaaaggtattgatcttaatattgacctttccggaggtgctatgcaaggatggagacaaaattatgaactcgctaatgcattccacggcaatggcaattcacctgaatatttattagaagaccgttggcaccgtgctgatttatatgatcccaatagcgaatggattcctggacgttatccagctattcgtaaaggtgagttcagctataataacaaaaatagcgatttttggctacataatgtacactacttacgcatcaagaatttagaaatcggctatagtttgcctattaaatggacaaaaactgtccatgcacaaaaaatacgtatctatgccaatgtttcgaatttatgttcgttcgataatgtacatcagttcgggattgaccctgaaattacagccgcagcagcagtagtatatccacagcaaagaacattccttcttggatttaatgtaacattctaaaacgatattattatgaaaaaaaattatataaaaatatttttgttgggagctgccattacgtctttattatcaagttgtggtgacggatggttcgaaagagatcccaaaaacatccttaccaatgaacaagtatggaacgaccctgccatgataaaatcacaattagccaacctatatgatagaattccccaattacatggcaactttaacacaggtggtatgtgtgaaactgatgatgcaatgtattgtggtactttagaccagaattatcgtaacgaactgcgttatggaaatgattacggacgttggtgggactatgaattcatacgtgatatcaatatgtccattgagaacattactaaatatggaacagaaatctccgaagaaagcaaaaatcaatttattgccgaatttcgctttatacgagcttatgtttatttcgaacttgtaagacgtatgggaggagtaccgctgatcacccaaacattagaatacgattttaatggtgatccttcttatcttcgtaccccacgtgcgaaagaacatgaaatttacgattttatttacaaggaatgcgaagaaatcaaaaatcaattaggcaacgcaaacagccaaactcgcgccaactattacacagcattagcattagaaagccgtgccatgttatacgctggttccatagctaaatacaatgctttaaaaactcccaatattgtaacttccggtggagaggtaggtattccttcagacatggcaaacggttattaccaaaaatcattatctgcttcaaaagaaattatagaagaaggaggatatgaactctataacaaagaagaagacaagggaatcaatttctataaaatgttaatggataaaaccggaaataaagaagttatttgggtaaaagattaccaaaatcctttaaaggtacatagtttcggatatgataatgttattcatcatttaagagaagataatgacaactcttcttgtattggcccatcattaggattagtagaggcctttgactatttagacgggacctcaggaacattacactataaaaacggcaacgattatatcgtttataaaaatcctagtgatatttttgccaataaagatgctcgtttatatggtactattatttatcccggtaccaagttcagaggtcaggacgttgatattcaagccggagtagctgtatggaatgatattaatggctcttacgatttacttactgatcccagcttggggagtttctatatagacaataaaacttttgtaggtcaagacggtccccaaaccaacacccctaacgttagcaacaccggattttatattcgcaaattcataagtgaagcttccggttatacacttcgtaattatgccgaaaactggtggccttggttccgtttaggagaaatttatctcaacgctactgaagcagcttttgaattaaatgatgaaacaaatgcattgcattatatcaataaactacgcgaacgtgcaggttttcccgccaatagtttaaataaacttacaatagagaaaattcaaaatgaacgacgcgtggaattagcttttgaagaccaccgctattttgatatgaaacgttggagaatagcagatgctgtttggaatggaaatgaggataatgatcaagccattgtttatggactatacccatatcgtattgctaaagctaaacctggtactcaagatcaagataaatacatttttgtgaaaacaagatctgaacgtttcaaagtagctagaactttccaacagtccaactattattcattcattgaggatgctgttatcaataataatccaacaattgtcaaaaacccattccaataaaaacaaaaaattatgagaaaaatatatatttttattattataatatgttgtctgcttacagccaacagttgcagttatgacaattttgatgaacctaaatccatgttaacaggaaaagccatttataatggtgaacctgtatccgttagaagtggaagttccgaatttgccctatttcaagacggatatgccttacatggttctatccctgtctatatcgcacaagacggaagttactcagtgaacctattcaacggagattataaacttgtacgcgttggtaatgcaccttgggaaaggccatccaatgatacgattcggattacagttaaagggaataccatacaagatatcccagtaacaccttacttttttattaaagatgtttcatttactaagagtaacaacaaaattgttgcaaaatttacagttaacaaagttattgctaatgctaatatggaagatgtaagtctttatctaggaaaaggcatcctaacagataacaatcaaaaagaagcaacgttgagtttaggaaacaagattcctctagaacaagagaccagcgctgaaatagacattccaaacaatctgatcaataaaacatatatttatgctcgtataggagtaaagtctgacaaatcctcagaatattgctatagtcaatccattaaggtagaattgaagtaaataaaactgatagaatacaaaaaacaaggggaaatatcgcaagttggtatttcccctttaaaattaacaaacctatgttacacatttattttcaatcaaaattgatcatcttaattttgctcttcacttctatatgcaatgtgcaatgcgctcagcatcctgccattcactttgaaatagaaacagaccaaccctgtcaaaccatggactatttcggagcatcagactgttggagcatgcaatttatcggcttatggccacaagaaaaacaaaaccaagtagccgactggctgttcagtacggaaaaccatgaaaacggacaacctaaaggaatcggtctgtctttatggcgtttcaatgtaggagccggaagcgcggaacaaggagaagtcagccagatagcctctccctggatgcgtgccgaatgtttccttcaggcagatggtaactataattggaataaacaacaagggcagcgcaacttcctgcgtctggcaaaagaacggggtgtaaacaattttttggcatttcttaattcacctcccgtatatttcacacaaaacggtcttgccaccaacacaggccgtggaggaaccttaaacttaaaggaagagcattataagaattttgcccattttcttgccaatgtcataaaaggggtggagaaacacgatggaatcaagttcaattacctctgtccattcaatgaacccgatgggcattggaactggattggccccaaacaagaaggtacaccggctaccaaccgcgaaatagcccgtgccatacgcctcatcagtaaagagttcgtaaataaccaaattgacacacagattctagtcaatgagtcctctgactatcgttgtatgttcgatactcacatgactaattgggaacgggggtatcaaatccagtctttctttaatccggacagtacagccacctatctgggtgatactcccaatgttccccggctgatggtagggcatagttattggactaatactcctctgaataatttacacgatatccgttgtcaattaaaagatactttagacaagtataaggtggatttctggcagacagaaacctgtattatgggcaatgacgaagaaatcggcggaggcggaggatatgacttcaccatgaagacagcattatatgtagcacggatcattcatcatgacattgtatatgcaggtgctcgcagttggcaatggtggcgatctatcggtggagattataaagacggattaatccgtgagtatagtgatccgacttttctgaatggtgaggtgaaagactccaaattaatgtgggctttgggaaactacagtagatttatacgcccgggagctgttcggaaagcaattatagccaaagacaaccaagggaaaatcattcctgaaggcgatacggatgtaaccggactaatgtgttcagcataccaaaatacagacggaaaggaggttttcgttatgattaattatgcagcggaagataaagagtttactttctatcagcgtaacggaattataaaaaactggacaatctatcgtacttcggataaagatggagagaatcttctaccggtaggaagcatcaaaaaccatgaaaaagttgtgatcccggcacgttccattattacgttggtcactcaataatactccaatatataaagaaataaggttggctctttgtgaagagttcagccttattctcttcttaaaatacatttcggttctcaatccttcctttttatactgctttccctcacctgcaaacaagtaggaacaatgatttgcctgatttttttatctcccttaatcttatcaatcaacatctgacatgcggcttcccccatcttataagtctgatgcgaaacggccgaaaggcgaggcactacataattggcatgttgctcatctgtatacccaataagcgctatatcctgaggaatacgaagattatgatttctaatcacttccatagcggcaaatgccaatgtatcattcatggcaagaattgcatcgggaggctccggaagcgataataaaatttctgtagctattttcccttcttcaaaatcaattttccgacacacaaccaaatctttctcaataggtatcttattttcccttaacgcttcaaggtaaccatgttttctctttcttactatatccagatggtttgcaccaccgataaaagcaatccgtttgcttccatgatccaacaagtgctgtgtcgccatctgagcggaatatactccatcagccactaccgtagaaaaacggtcaggcatgcaaacacgatcaaatagaacaagcggcatattcatattatccaaactcaaccaatgggcataatctgttgtttcttgagataaacaacctataataccttccacatgcatattgaccaaattctcaatatttcttttctcatggtcgtatgactcatgggaagtcgtgataataacaaaatagccgtttgctatagcggtatcttctataccacttaaaatagacgcaaagaaatgagtaacaatatcaggtacaattactccaatggtacggggagtatttttccggagactcatagcaaaaggattggggtgataattcatctcttttgccaatttttgagctttaatacaaagttcccgactgatttcgggactatttttcaaggcacgggatactgtaggtatggatacacctaatatctgtgccaaatctttcaatgaagtacgtctcgattctgccatatcaatgttgtaaacggtgattcacctacaaagaaagcatattctcaccaatatacatacaaagagtgcattttttagtgataagattagtggtaaatattgcgatatgtacccactattcaccaccaaccacttatcactaataaatcgttccgcgcatccggtcttcgaatgcaactaaagcagccttggcgccttcccccattgctataactatctgtttataagaaacatccgttacatctccggcagcatagataccttttacagaggtccgtccatttttatcagtcagaatttcacccatgcggttcgtttccagcaattctttaaacaaagcgctattggcagtcaaaccaatttggacaaaaataccatccaaggcaaatatctcttctttttcggatgaacggtctttctttataagccccaccactttatcaccgtttcctaacacctctaccgtttgagtattagtaataatatccacattgggcaggcttttagctttctcctgcaaaacagtatccgctttcaaagtatccatgaactcgaatacagtcactttggaacagattcccgccaaatcaatagcagcttcaaccccagagtttccaccacctatgactgctacttccttatctttataaaatggtccgtcacaatgaggacagaaagcaactccatgaccgatgtatttttcttcaccgggaacattcaattttctccaattcgccccggtagcaatgatcaatacgggagccttgtacgtttctccacctttcacagacaacactttcatgccctctgtcacttccactttctctatccggcgattttctaaaatatcaatatgatattccgtcaaatgttttttcagatcctgagccaactgtttaccggtagtctgaggcacagatatcaagttctcaatccccattgtctcattgacttgtccaccaatacgctcggctattattgctactttcaaccctttacgagctgagtagatagcagctgtcgcaccagcaggaccagcaccggctaccagtacatcatattcttttgtctcaacagcttccaattccaccgaaccgtaacgggcttccagcttctccaacagatcccccatactgctacgccccacatgaatctgttcaccatcagcaaatacagtaggaacagcctgtactttcatccgttccacttcttcttcatttatagatccatctactgcctcatggcgtatctgaccattcagaagtaccatcatattcaaagcttgaaccacatcgggacaattggtacaggtgagagacaaataggtggtcaaactaatcggcccctgtaacgccttgatacgtctggtaataaactcgtccggaaaattctttcctttgccgtcagcattcagaacagccatcaacaaagaagtaaattcatgaccaccaggtacggcacgaaatgtgattcccgtatcctttccttcttttaaaaggataaacttcagcccttcactatcctgcaaccgacaggaaagtttatccgaacaggaagccacttcttccaacaagtccaccaactcggcatgactttcgtgctgagggtggacaaagatgtcaaaagtatagtgcgcttccaattaggcaaaaagaccttttaactgatcttttatcgcactatctaacatgagttctatactttaaattttacctaccaaatcaatactcggtttcaaggtctcagcacctttcttccatttagcaggacaaacctcaccatcatgagtggctacaaactgggcagcttctaccttacgaagaagttcatcagcattacgcccgatactgttgtcctgaatttcagctaatttgatcttgccttcgggattcactacaaaagtgccacgataagccataccgtcttcttcaatcatcacaccaaatgcacgcgacaaagcacctgtaggatctgccaacatcggataagtgattttgcggatgctttcagacgcatcatgccatgctttatgaacgaaatgtgaatcggtgcttacagaatatacttccactcccattgctttgaactgattatacttttcagcaatatctacaagttcggtagggcatacaaacgtaaagtcagcaggatagaagaagaaaatagcccatttaccttcaatatctttattagttacggttttaaactctccattatggaatgcctgaactttaaattcaggaacttgtgaattaataattggttccatactctttttatttttaaattgaaactgatttttaaattgtaattattacatttgcaaaggtaaccgacttcagcaccttccacaatacctaattattaggattgtatagaacaagattcaccataaataggtattggataaacgatttttttaatcgaattttgcatggagttaaaaggatgctaaatattttaacaacaatagtttatattagaataattatttaaaagtacatgtagtatgaaaatagaaaaaattatagcccgcgagatattagactcacgtggtaatcccacagtagaagtcgatgttacattagaatcaggaatcacaggtcgtgcatcggttccgtcaggagcatcaaccggagaacacgaagcattagaactacgcgatggtgacaaaactcgctataatggaaaaggaatcttaaaagctgtagccaatgtaaacacaatcattgccccggcgctaattggttgctcagcactggaacaacgtgccattgataaaaagatgttagcattagatggtactcccactaaatccaaactcggggccaatgccattttaggcgtatcgctagcagtagcaaaagcagccgcaaactatctggatatacctttatatagatacataggtgggacgaatacatacgtaatgccggttccaatgatgaatatcatcaatggcggttcacatagtgatgctcccattgcttttcaagaatttatgattcgtcctgtaggtgctccatctttccacgaaggtttacgcatgggagccgaagtattccatgcgctgaaaaaagtattgcatgaccgcggtctgagcactgccgtaggcgatgaaggtggttttgctcctgccttgaacggaaccgaggatgccattgaatctattctggcagccatcaagaatgcaggttatgaaccgggtaaagatgtcatgattggtatggactgtgcttcttctgaattctataagaatggcgtttatgactatacgatttttgaaggagaaacaggcaaaaaacgtacgactgacgagcaaattaattatctggaagaattgattaataagtatcctatcgattctattgaggacggtatgagtgaaaatgactgggaagggtggaagaagctgaccgaacgtataggcaaccgttgccaactggtaggtgatgacttgttcgtaaccaatgtagaattcctttcaaaaggtattgcacaaggatgcgccaactctatcctgatcaaagtcaatcaaataggttctttaagtgaaacactggatgctattgaaatggctcatcgtcatggatataccactgttacttcccaccgctcaggagaaacggaagacgcaaccattgcagacattgccgtagctaccaatagtggacaaatcaaaacaggctcattgagccggagcgaccgcatggcaaaatacaaccagttactccgtattgaagaggaactgggtaatttggccgtatatggttacaaacgaatcaaataattggatcttttgtacatttatgtaatcggatagcgtctttgagaaaaggcgctattttttttggatattgctttccgatgacattcttaaaaaaaatataaaagcctcctgtcttctgtctgtcctttaaaggttttatgtacttttgtaccgctttaaacaaaaaacaatcaataaaaatggacgattcaataccacgaacgtgcaatagtattaactgatccgacagggcaatcactactctgaatgcctctgaacggatataaatgaacgaaaggaggcaataagatgagaaaatatctttattgtgaaaatggctttgtagaaaagccacaatggatgccaaactgctgggtgaatgtagaatgccccgaccaaagtgattttgagtttctgactaaagaattaaaagtccccgaagcttttttagaggacatcgccgatatggatgaacgtccacgaacggatacggaagacaactggctactgaccattatccgaatccccctgcaacaacagggaagcatcccttatatcactatccctatcggtatcattacaaataatgaaatcattgttaccgtgtgttatcactccactgaaatgattcctgatttcattgaccacacccgacgtaaaggaatcattgtgcctaataaatttgaactgattttacggttaatttactcatctgccgtatggttcttgaaatatctgaaacaaataaacaatgatgtagctgccgcagaaaaagaattggaaaggagcatacgtaatgaggacctgctaagattgatgaaactacaaaaaacattggtttatttcaatacgtccattcgtggaaatgaggtgatggtaggtaaattgcaaagtatcttccaggaaaaagattatcaaaaccgcgatttggtagaagatgtagtcattgaattaaaacaagcatataacacggtaaatatctacagtgatatcttaaccggaaccatggacgcatttgcttccatcatatccaataatgtgaacaccatcatgaaacgcatgaccagtatttccatcattctgatggtacccacattaatagctagtttctatggaatgaacgtagatgtacatgtagatgcattaccacatgcttttagttttattattttggcgtccatcacattgtctgcgttggcctttgttattttcaggaagataaagtggttctaaaaaatcctgtaacaatatcatatgacctgtcattcacgacaacaggtcatatgataaaactcttttcgccccctaatcttatgacaaagagattcaatttactcttgatttctttctccaaatacgttttatccataaatagtatcctgttaatggcaaggtggctcctatcaaagctgctataaacgtcagtaaacgagtaagcataccgccccaactaccaacatgtacagaatagatccatccgcgaatctttccagccttctcagcatctttatataaaactacctcatcaatctcaccactatgaggattgaatttataacggtcggaagcacgttgattaccaaaggtattgaaagaaacatttgctaccccatctgataaggttatctgtttgtaaccgggattatttagggctaattgttcataaacttgttgccaacaaacataggacgaagaatgagaaacattctttccaggttgatcactacctctaccaccacgcagagtcaccccactatgtgtacctccctgttgtacttccacgccaaacactttatagaaacctgtccgataccatccaaaagaccatgttaacccagtaagggccatagccaataaaaaaaacagcgcatacattccacctgcaacatgcaggtcataccaaaatcttctaaagcccctgccgacagatattcttaaactatttttcaaggcttttcgtgtacgaggccaccagataacgatacccgatatcaaaaccacgacaaacaacagggtgctgacacctacaatcatttttccccaaaagactccgccatccgctttcatactgtccaacagccagcgatgcagcctgaacatagtcacaaaaaatgcaggacgttcatatttacctttaatctcaccagtatattgatccacatacatagaagcacgacgaggcttggacagattcacctgccaagcgcgttccgggtcagaaaaaacactgattcctatcacaaacacactgtcgggtaacgtgagttctacctcttctaataatcgatcaacaggaagtggaactgtctctaccttttttacataatagagttcatgcctagccagttccatcacttcattttcaaaaaccagcatagctcccgagaagcaaatcaaggtaatgattaacccgaaaggaacagaaagccaaagatgtatttggcgaaatattttcttcataaaatcttcaatacaattcataaaaagagtctgcataagcacatactgcccgcagactcccactatattattacaatactcagttctgaggttgcagtttaccgacgccactgatttgtgtcgcttctatagaaacaccctttgtcgctaccgcaccaaccggatctattttataaatagacggatatccttctgttgtagttacagccatataggcatatccattctccacatacggagtattaccaaagccagagatcaaatcggcagaaggcaagccggttacataagtaagttttccggtttctcctttatatatcgctaactgattagctgtgaaaccagtttcagtcaagggacgatcatacatcaacaacaagaaataatctcccgtaatatgccaacaacgaatgaaagatttacctccggtctgcgcttcgatactataataataatcaggatcaaactcttctgttccagcctttatacgtactactccagcatccaaggtagtctgttgccgtttatcagccattgttttggcataactaggagaaaatacataaatatcaccattatctgccgcccaaatagtttggtaatattgagacttcattcgcccacaagcatagctgattttatcagtcacaataatctttttagtagtcagcgtttcattatcaaaaatagcgacccagcatttgttgggatattgcgtccattgcaattcgccttttttataactgctgctgttggaaccaccgtcttctgtctttaccaaatcatcattgccaggaagtatccattttcccccgtcagtggccgatccatattgacttaaccccattggaatagcagcgctatacagcttattattttgttccaatatgccggccaatgttacatattctccatttcccaagaagttctcggacatataagccttattttgagtatcattcgttgtaaatgtttcagcagatacatccaaataagaaagcaaaaacatttttggtaaatatccattctcatcagcatacgcagtgggtccgtcaccggtagacgaggtcatgatatatttatcataaataccgtaagtagtaaatctctttacggcaaactcccccgaacgagcctttacttcattatttgaatccatgatataagaacgggtcgtacctgcattcccttgattataagtcagtgcataaagatattgattcttgtaaaacacccattgagttgcgccatcattcacaagaccattattcactgtagaaacagtgcctttatccaacgtttcagaagtaagcagtacattcgttgtatttccagacgctgtgaccgaagatgcaataacatactcacctttagcctcggtacccgaaccgtaatccggctcattatccgtacatgcactcaacaccattcctactatggcaatagcaacaaatccattcaaaaagaaaactttcttcattttattcttctatttaatttaacctaagttcaagcggataatgcaacaggagtgagaatgatgacaatgagaagatacgaaaagaataatttttcagaggaacagagaaagaagatttctttcccttttgttcccctgtggaaaagttgtttctttgcatcttccagttccccaacattcagttgcaatatgaaacagctaaccgaagaacaaaggtataacatttccgcttatctgcaaagcggaaagtcaagaaccgagattgccaatcttgtaggagttcatcgtagcactataagtcgtgaattacgtcgtaatagtgataaacgtaatggcatttacaaaccggatctcgctcaggctaagtatatgtccagaatgcgttcacgaaagcacttcgtgaagtttacggacgacttgaaaattcaagtagatatactcataaagaaagatttcagtccagaacaagtgactgggtttatgcgaacaaagggcttggaaacagtttctcatgagacaatctaccagtatatttgggaagataaaaagcatggagataagttgttatacaagcatttaagaagacggggaagaagtcataagaagagaggtgcattgactaatggacgtggttttatcaaaaaccgcgtggacatagacaagcgtcctacgatagtagacaagaaagtacgttttggtgatttggaaattgacacagtcattggaatgaatcacaaaggagcactattaactataaacgacagggtaactggactagtatggataagactacttagcgggaaagatgccagcccgctaactaaagctgccatcgatgccttggaaccttttagagaccaaatacatacaataacggcagataatggaaaagaatttagttttcacgaagaaattgcacgtaaactaaatatttttgtttactttgcaaaaccataccactcgtgggaaagaggagccaatgaaaacagcaatggtttgattaggcaatacttcccgaagggtacggactttagggacataaccaatgaacaggtaatgcgcgttcaaaacatcttaaactcaagaccgagaaaaagattgggttacatgaccccaaaggaaaaatataaattattaactaacaatgaattcgacactgttgcattgtctgtttgaattcaggtaaaatccaattaattataaactttttccaattctttaattaccgaaacaaacacgcagtttaccataaaaagcccgaccggccttctgaagactaaaattatcatataacttctcatctgtgaagttacgacattccaatgatacgttatatcgtcctttttgcaaactataagaaagggatatattgtgtgagaattgatcaggtaccacatagtcccccttatttgagcctattcgggaagaataataagtaaagctatgcagatattgattatcataagacactgtcaacatattgcctttccttcctaaatcccgccaataaaaagtaacatccgaatcagcaaacatataaggcaggttcggcatccgttctttataagccaaattttccgcactgctggaaatagatgttttcatattgtcgcgtacatccattttggtaaaattacctcctatactcacccaattgccaaaaccgtaacgagcagaaacagtatatcctttcgtcaatactttaccgtaattaatatatttcgcagcatatttaccaccactcaaatccgcaatattacgctgaatataatctttcgtattccgataaatcactccaccttccatatatacagaatgcctgccaaatgttctgttatagctcaaattaaaattcaaattatcactactctcaggttttatactgatatctcccatttccaaatcctcatctccaaacatttcttcaatagtaggcagacgatatgctttttcgtatgacaattttgcctgcaaaccggatagaatgaaataagttcccgcagctccataccctatggaattcatgtttcgggtagtacggacataatcatcctgattcgtagtcgtagccataggacctgctacatacaaactataatattttccaaacactgagaggttccaattatcagacggcatcaaccgataggataatccggagatattcttatgggtttctttagcgatggcatcctccgattccaccttagccaataaagaagtattagaacggcgaaaagtattcaacacatgattaaaggtcagcatgtgcattttcgccagacggtaattaacagttaatgttccattccaattgttattatccgcccgtgaatattgattggattgttcaccgggtgagttcattaatttcctatcacccaaccaattgtacttatatgaagctgtatctatatttgccgttgcatttttattataattggcagtcaatgccacattcagacctttgattaataagtcacgcttattatactccaatgacggcatcaacgaatgtcctttacgatgtttttccccataaactatttcctgacgtactccggtctgtatctccttatacatatgtgaataagtaaagcccaacatcaatctgtctgcccatttcttatccacaatgccaatcttacctataaccgcctcattatgataggtatcattaaagcgcttgacacgtacccttttatctttatcaattcttccggtttcaaagtcctctaccggtgcatccacatgataatcattatccgaatagttttggaaagcatttatttcataagtaaagccgtttttgaaagtttgtccgaaattcacatacgatttatgcgtattgaacgacccgtatgaataggagccatccaaaaaccaattacgtctcttcttattggttacaatattgataacaccacctatagcatccgtgccaaatcctacaggaaccacccctttatacacttcaatcctatctgcaaaattcacaggaatattatttaagccaaaagaactccctactccctcctgaggtacaccgtcaataaatatcttcacatgtttgccactgaaaccatccaacatcaattgcatatccgaacctaccccacctgactcacggagtttcattcccggagctttagccaaagcatcactcagatttttggtagaattctggaactcttttgtatctactgctatcgcattgaatgcggaacgtttcacacgggaaaccccgttagataccactacaacttcatccaattcagtcactgacggggcaatcattacattcatcttaatcctttctccatgaactaaagttatgggcttttctatagtctcatatcctatagccgaaacaaccagtgtatatttccctgccggtgcatgaagatgataaataccttcttcattcgttgtacagccataagttgtacccttcaaatatacggtcgcaaaatctacgacttcctgtttttctttggatatcactttaccggataccattatcttaggttgtgcaaagatagatatcgctccgattattaaaaaaagggatcctaaactaatcctttgtaactgtcttcttaccatgaatacctataattctaaattcttaatttttgggaatgcaaagttctataaaaagaaagggggaaacaatcacctgatatcggtaatcttttcccccattttacagaatatatatactacgcaatagctctttataggtatttatgcaataaacacgctatcgggtctagttccggaaatcaaaccatagcttcattctaaagccatcatcccctttattaattttaatataagaagcctctcctcctgtcccctgagagttgacagccggaatttcaaataagaacgaaaggtctccagcaggatattcctttactgatattccacggctttcacggtcacgctgctcctccggagtgaagacgcgaaagaaaataccgtcagtttccgaataaactgtcatcggtgttgtctttgattggagtgttgcccaatagagatctgcatgataccctttgaattccggataaataagctgatgataatattctcccgtcaccgtattgttgtagtccttctgccaaataccataattcgttccttcgatacggttcttccatactcggtaaggacctttgcctaaccaacgcatcccactgatgttcttttcaggaaaagagaatgaaaaaccgaaattaagaaccggacggtcaaagtatacaccgtcaaacttgttttttgctctgtaattcagcactaatgcatccattccaagcaatccgtcaggtgccattctccagacaatggagtcggccgcacctttatattttacggtataaatggcagtatcaccttgcatctttaggttagcagaacagaaaagcatcttcatcccgaccgggagaggaccatcagacaatggtatgatcttgctaccgttcttcacttctaccaaattaccattcgctttgttgaatgttgctgtaactccattcgctatcagtgtaacactattgtcgtctgtctgatatctggcagtagcagttgttgtcggttgtaaatacctgtattctataaagtacttacggttattcttgataggaaacgtccaattacatatcatatctcccgctacattgtaggcttccaattccaagatgtctccattgaagaatttctcaggcaaatcaaagtgggctatccccttctcgccaggctgaatcgcaggtaacagtacgccgccctccgctaagcagatggggctgtcggacacctgtggaataggtaaacgcattaccttccacttcatccggcattcgcttaagttgctgaataagtaatcgttagttacataaaaatctcctttgaaagaagaagttatttttaatggatgtatttgaatgggtgaccatacctcccgaacagtataaaaactgccttctttttcgcgatttgcccccacaataccatcgggagcattaggaccgtaagtgtccatttgtccggtatctgtacggcggacagcttcatccacatatgcccaaaggaagccaccggcaaaaagtggatttgccttaaactttgaccatagtcctttgaggcctgcaccctgtccacggtcatagaggccatgcaggaactccgtcatcataaaaaccttatgcccgcgttccaaccgatacatgttatccgtaccattagggtaatgacgtgtatccaagccattgaaatccgcccacggatgaatgacgtgacgtttctgcggatcatagtcggcaaaacgattgtcaacagcagtattccatcctccttcgttaccatttgcccaaacaaagatacacgggtgattcacatcacgaaatatcatctcaggcagtaacttttctgctatttcagtgctatagctattctgccaaccacataattcattgagataaagaagacctatggaatcacacgcctctaaaaaatgagtatctggtggataatgtgaacgcacggcattcatattcatctgcttaatgagcaaagcatccttcagactgagttcccggctgattgtcctacctgtttccggatcaaagcaatgacggttaatccccttcactaaaagacgagtaccgttcagatatacgccatcttcaggacggaattcaatggtacggaatcctatgcgctccgtaatctcgtgcacaacatctcctgttgtggaaagaagacgcatcgtgagtcggtaaaggttgggatgttcaggatcccatgtcctgatattgttccaatgtgtggtaagtatctgtttctcttccgtcgaaagcccgcatacctgcctccctataggaagctgtgaatcacaggaaatgagcgacagttccaattgttgtcctttggaaatatttttcaaatatacatctgtgtgcaacgtaccgtcagcacgggcatccaccgctatatgttctatttgcgtgcgaggctttaccgtcagatatacaggacgatagatacctccgaaaagccaccagtcagcccggcgctccgctgcattaactgatttatcagccgactgcttcttcaccgtcacttccatcaaattcgttttcccgaatttcagtctgtccgtgatatcataagaaaaacgatagaatgatccctgatgaacagggccagcgatgacatcgttgattttcacttcagcatcagtcataacaccttcaaatacaatacttatctgtttgcctttccaagtgtccggaacatcaaaacaatgacgatagatgccgtattcatcgcaaaaatcatgttccctgtaggcatcatattgcttttctttctcgtgttccttataaatataatagcgcccgtaggtatagcctccaaaaccttgctgttcccagcaagacggaacatctatcttgctccacttttgagagttcatacctgaagagcaccagaaattccacttcacagtatgatccggtcctgtaccggaaagatacctcacttctgtctgttgagcttttgtcgtgcaaaagcataataaaataatgaacagtccaataattttcttcatacaattcatgctacattaataggttggttgaactggaaatacatagaacattctgtctggtttgaaatcaatcatccattgatctatcaggacatgatcatccaaagcagtgatggataaagtatgctttcctttcgtcaattgatgaccagtttcacgaacagcctgtccacggagtacattctgtttccatccttccgaacgaaacggctctttaatagaacatatccgaggcttttcaccatctatactaacactgaaacgaatatctcctttatcattaggttgtgtcgggattacggcagtgcgcagtatcgcctctccatcccataaacaatcaaactcaaaagtaattgactttccctttggtacggaaacagcattcatactatgtcccaatgattgaatcgtcacgacccctttggatgcgcttgtataatcgcaagcattagaaacaatacaatgatccttagccacttcctccaaaggtaacgattttggccttctaaaagaagcatatttctctatttccttatctgtcagccatatgggaatttcaggcggatagaacacatataaatcccgcggattatggcacatggagtatttccatttgccatctgccagttcattgttatagtaatctgtcaaatcgcggatttcctggtaagctttaatgcttttggcacaggcagccattaattgactttcgcgggtccataaagtcgtgtcgcagcttcccggagagatgcaacgtgctctttgtgcctccagcatctttgtgctcatggcagcagcgccaaatacaggatacttaatttgggcaaagaaagcatctttgcgttcctgaggaatcattggttccacttccgataaaatctctttaatggcttcataggattccagataacgatccagttcgccgccgaattcggttaagctaaagtccgtatttttaaccggagaccagcctttggtatattttttcttgtccagctccacttggttccaacccataaattccggtttacggatgccgcacaggcgataaaactctaacatggcaggcaataatttttctcctgcttctttgccaaattcgcggcaaagccagctcttctgatgctccacaagagtagatggagatacggaattgatattccatgccatatccagaaagagttccaaatcgtatgccgcgggtttcaaatcgtgcacattaaccacccacaaacggcgggcattgcaatcgtatgcctgtttcatttcactataaatcaatcccggctgggtagtgcataaccacatatagtcatgcggacgcccccaataactgagatgataatacactccggcacctccgttacgcttttgctgttccttgtcacttaaacgggtcatatagccatagttgtcatcacaccatatcaaagtgatgtcttccggcagttgcaagccattctccattatttgaagcacttctttataggggacaaaagcctggggaattttctccacatctttatctacatacttcgataataacttgcgctggtcgtcaataacctgttgcagtgcatcggtcttttcctgaagggtcttgaccccttccattccactgtcgtgaatacctctcatacccatggtgtagaaattttcataaggtccagcctctttcagccgttctatccaataggattgtaccccttcacggtttgttatgtaattatagtcaccccgttcattgactttccattcacctacattattgcgcatcattggctcgcaatgcgaagtaccgatgagaatgccgcaactgtcagctgcttctttagctcccggcacaaagtagaacggagtcgtaattccatgcattcccggccaaatagcattggcacgaaggcgcatcagcaatttgaagatttctttataagtacgtgcaccaatacgtccttttatatcagacggttcaaagtttttccagctccaaggctgcaagctccagtcttcatcatttaaaaagattccacgatactctaccgatggactctgaaaagtagaataatcagccggaagggtcaatcgctcttttctcatcggtgtcacatctccccaccatacccatggagacactcctgccaagcgggaaagttcaagtatgccgtaagcagttccccgaccgtcacttcctacaaccaacaactgattttctcttatctttataaaaaaagcgtcttttctggcaacaatactatccaccgggattccgtctttacggagatctcttaggatagacttgtttttatccaactgaataatattaataaccgccgttccgaaaagagttttttgaggtaatacccccgtcacctgttgcatgtcacccttaaacatatccagtgctaccgtcactactggagaaacagatccaggcaaggaataagtaataggacgtttaccattataccaaacaaattctttattggcaacaacctttcttgtactagctgcacaaatcactacaatatgcacaaacaaagctacactggttatagccataatcaataatcgactttccctttttaatttcacattcatcagttattctactttaattgatttttttaataacgaggatgccatatatcataacatccccgtcctaaacacatctcaatactatctaatcaccttactaataccctggattctgatcttcagcactcatcaactcattcgcatcaatcgccgcctgaggaataggacgaagtaatttctttccaatcatttgtgcggcccgcccttttatctgaggattatataaatcattatactccaccaatttctgtgtacgtcttaaatcaatccatcgagatccctgtccaaataactcacaagcacgttcttttaaaataacatccacatttatttcagttaccgcatcaagccgtgcacgtcggcgcacttcattcaaacgaagcaaagcatttcccttatcaccagcttttaaataagcctctgctgctaccaaataaatctcaggaagcgtaataatatgtacatcacgataatctgttttattagaataactagcagtattagaatcatcaaatttacgacaaggagcgcccccataagaataggttacgaattcctcataatcaatttctccaggcatatattcttgaggatcccgtgtatgatcagacatcggtagtatccatgtatttttacgattttcaggatcaagagctttccatgcatcgatatcttcttctgtttcataccatgccggatagtaacgtttcaaaggaattcctataaaagttccaccattcttataccaatcccaataccaataagcggatgcagtaacaatatcaggtaactccttcataaacgttaccccatagcgtatatcgcctttttcaaaacactgcaaagcatgtaaagtcgcaataaaagcagaagtactcccctttccatgatcttcttgccccccatatgattacaataaaaggaactccacggatgcccaccactgactgtattagcagccgtagcatagtcatattccacatcccaaataaattcttcgttatcatctccactacaatccgctctccaaagatcctcgaaaggagtaaccaaagcacgattagctatcacgtcatctgctacttgggctgctttggcaaagtaatcttttttatctaaatcccaagctgctgctaaataagttttagctaataacgcacgagccgattcaatacttatacgaccaccaccatccaaagcggtagacttttccatagctccggcagctattacattctccaattcctcaataatataagtgtaaacatcaaccaccgaagatttaggatatccggtttgaacatcagccacataatctttcatcaaaggtacccccccgaaagtatttaccaatatatagtaataattcgccgccaatactcgtgcctcatccacacgcctgctacgcaaattctcatcaataactgcatccgccgcataatgttttatagcataagccgcacggatacctttataacatgccgtataaagctctttcatcacactgttttcaggatttaaagtttcatattcatgcaactcatcattgatataattacgcccatcagcatacatatccgtacctgcattaaaataagtagtataactggatactgcataaacatctcgtaaagtactataagcatttgataccaaagattcaaaacctgtcttagtcgagaaatattctttgtccgttacatttgacttattatctgtagtcagaaaatcttcacaacttgtagtcaaaacaaagccaaccaatatgactgccgtatatatatattttttcataccatttacctttcctttgaaattaaaacttaatattcgcacctatctgataagttaccgatgcaggaccaccatcagttaatttagcatttgcccattcaggatcaaatccatcataatccgtaaaacaaaatggattaagcacattgatataaagacgcaaatgctgtaatcctgctttagtaatccacttcttagggaaagtatatcccaaacagatattttttacctttacaaaagaagtcttctgatactgaaagccttctcccttcgcgctacctttatcagaaaaatatccacctgccgaagtatcggaattattcggataaggatattcaccgtaatgagtttcagtggcatatacaatatcaccggtagtatggtcaataacaggcgcccctttaggaatataaaaatccattgccatatgttggttaccacgatcagaccatttcatatatttatcatggaaataactacgagcccattgtccttgtttagtataaatcattactgagaaatcgaaacctttataatacatatttgaacttaaacttcccacccatttaggatctgtacaaccatatatttgcttatcttcatccgtaatcttgccatcattattccaatcattcacagctatctgaccttcataccacttatatttcgaaccatactttgcatacaattcttgcaaagtataatgaatatccccatctttagtgtgcatcgttacccctttatcagttatcacatcagtatgaatatagtcacgcaatacatttaacggctcaccaataaagcgattggatgcaatttcatccactttcccattactaagttccaatattttattccagttacgagaataattcacacttaaatcccatataaaatctttactccgaataatgccaaactgcattcctaattcaattccggtattacgaactgaaccgacattaaaagtagcttttgtttcacctgtttcaacaggaacaatcctatccataatctgcccatcagacaaacgatgataaaaatcggctgtcagattaatacgattactcaatacactaaaatccaatcctaaatcaaactcttttaccttttcccaaatgagtcccgtattaacaagcccattagggtaatatccttgtatttccgatcctcccaataccacataactaggtcctgaagctgtagctattgtcacataatcatccacattgttgttaccggtaactccataagacaaacgcaatttcaaattatccaaccaatgagtaccttttaaaaagctttcttctgacatacgccatgccaaagcaacggaaggaaaccatccccaacggttaccttctgcaaagcgtgaagaaccatcagcacgtgctgtagctgtcgccatatacttacctttatatgaataattcaaacgaagagctcctgagaccaaagtagatgctgtataggaagaagctatctccttatcaccggaagccttatccaaggcatgaaaagaaagcatatcatccgaaataccaaagcctttcaatctataaatttctttatcagaacgatatatggagaataaacccatcgcgccaaacgtatgatcacctattgttttattaaaatcaagctgattatcccaagtccagtccatacggtctgtcgtctcaacctctgcagagttcgttccgttcacctgataataattggaacctagcggattacggtcattcactccagtagcattaaactttccttgacgcccatgataaaagttaggtgaaaaagtagtcgcaaattttaatccatccattatattagtacgcaaatatacattgccaaagacatgaaatttgcgagtttgattagtatagttttcatcctctaaatcattcagtgggctaacagtagaagtgaattgtccggtagacccaaaagcatcctttgaccctggattattgataatgttaccattttcatcataaggtgcaacaaaaggattgaaataaaaagcgttttcatacggacaataagttccatcggtactaaaatcatcttgcaccgtataagccatattcacagataatccagcttcaaatactttggaaatttttccatcaaaagcacctttgatattgaaacgggaataatcattatgtttaaacacattttcttccccttgataaccaactcctaaccgataattaattttttctgtggctccgttggcactgatataatgattctgctgattacctgtccgagttacgaggtctgtccagtcataaccatctgttcccgacatcatcatctcataaatttgggaatcacgatagtttgtaccaccatcacgtttcagaaacgtagtttccaaatcagattgtttaatttcataatgaggaataccgttcgcatctactcctttacgactagaaccatcaaagacatctgatgttaaaagagtatgacgtgcaaaacgataatctataaattcttgagcattcataaaatcaggcatacgggcaaccttacgtatcccataatatccatcatacgaaatagaaacatgttgaggttttcctgcccccttcgcacctttggttgtaatcataatcacaccagcagaagcacgtgagccatagatagcagtagacgaggcatctttcaagacgtctacccgctcaatatcctcgggattcaaaaaatccatagacgagcacacaataccatcaattacataaagaggagcagcctgtttatttatagatgcctgtccacgtatctgaatattaaatccgccacccgcacggctattggattgagtgatatttactcccggaaccgcaccttgtaatgcatcttccaaacgggtagtacctctagcagcgagtttttcagaagatatagaacctacagaacctgtcaaatctgatttcttcatggtaccataacctaccaccactacttcatccaatacttcggtatcatccattaaagtcagactgaaagaagtctgccctttaactgggatttccaaagtcttgtatccaacaaaacttacctgaatcgtcccattggtagggacatcagaaagaataaagttcccatcaatatctgttatagtcccattagcggttcctttcaccaccacactggcaccaataacaacctcaccatttgcatctattacggttcctttaatcttactaggctgctggtacgcagaaaccagtaacgattcatttaccgcataagcaacatgacttcctgaaagaaaagctgcacaaataaaaaccgcaagaagcgattttctgtttccataaaaattagatttcattagccaacctttttaaattagacattaaagttttaatgccacaaaagtaatcagctattcattttacagagatgaagcatctcccgataaggttgaagcatgttttctccaccttttaggaacatatttcaaccttgtccaccttggcatgttcaagcgtttttgcccgatttcatcgaatattctgtaggctgcataccaaattccttcttaaaacagatagaaaaatacttgggatcattaaacccgaccttataagccagttcggaaatgcggaaattcggattttcatccatcatcctgcaagccgccttcagacggatactacgtacaaagccagttgtattcaatcccgtcaaagatttcaatttcttatgcaacgttgtacgactggttgccatctcatctacaaactgcggaacatcaaaatcgggatcatccaaatgacggttcacacaggcgacagcatcctgcaaaaacttttcttcatccgaaggtatgttcgtaaagaactgcaattttagatgatgcaccttgtccgtctcaccttcctgcaaaaacctacgattacgcaataacagcctccgacgaatctcccaccatatcaataccataaacagtatagccaataatacataaataaaataagcccaccaagtagcccagaaaggtggttcaataataatttccatttctctcacgtcaccccaatcaccattctcattcgttgcccgtagctgaaacacgtactcccctgcaggcaatttggaataataggcagtccggctggaagcgtccacataatgccaatcagcatcaaagccttgcaacctgtacgcatatttattttgctggggacgattataagtcagcgatgcaaaacaaatggtaaaatgggaatatgaggcaggaataactaatctgtctgtaaaatcggaagtaaaaggagttatctcctttcttttcttatccgacatctgttccaatggtcttccatccaccaagatatcagttatgcataaagaaatatcagcatgtttctcttccaccacttccgagttgaaagtcacaattcccctgctgcatccaaaatagaaggtaccatcacgatagaaagaagcattttgattaaagaaattatccgccaacccatcggcaactgtaaagatacgtaccctgcccttttcctttccggatatggttagctttgccagcccttgattggtgcccaaccacagattaccactattatcttcctgcatactgccaaccatatctccgggcaaattaaactccttatgaacagacttgaaacaatcattttgcacatcatataaacaaagtccgctgccctctgtcccgacccaaatccgtccgcttctatccaacaaaaaacaaagaggagtattaaccgacagcaaaccattctccatacaatagttcttacactgcaacgattccggacgttccatatcccctgtaacatgaacaataccattattgttggttgccaaccataatgagccgtcattatcctcaaccatcgtggtcatctcccggccaagcaattcgtctgctctggacaaacgattgaaacaatactcacgcccgtcccggtaacgcactccaagtcctttataggtacacaaccagcggtttcccttacggtcctcgtgaactaaatacactaaatcatgaggaacaaaaccacaattcgaggtcttatactgatgtattatttgtccgtcacgacaaactatcatcccctcgtcatgcacagcaagcaatacctcacgggttaacgagctataagaaatatgataaggacgtttcgaaggaaacaatgtcacttttttatctccatgctgataatccaatccatagcccatacctatccaaagagctccattttcttccacatacaatgtagaaatcaaatctgtaaaagatttatcgttgccacgaggataaattacattaaaggaacgtttcctagtatcgacatgaaagacaccagcccctttagtaccgatccacattaatccgcttcgatccctaaagactgtgttcacctcgcggacaggaagataatgtgtagagccagattcttgataattgataaactttccctcatcagccagttccatcacactaacaccctctctagtacccaaccataacgaacgtgtctgtaaatcttcatgaatcgaataaatataatcagacggcaaagaagaaacatttcgggcatcatgtctataaccttcaaaagaaaccgttttcctatcggatgaaaaatgggccttatacagcccggacccactagttcctatccacatcacccctctagagtcctgaaacaaagccaaaacagagttctcttcatctaaaggcggatagtgcaaaaatgtattttcctttatgcaataacgataaagcccatccttccaggtgcctatcaacaaatcaccatttacatcctcaaacaaagtttgaatattcacagattcgggtacgtcccctctacaattcttccgagtcatcaaagccaatgtatcctgcatttcatcataataagccattccacggatgtaccccagataaacccggttctcttttgttacatgaatttcattcagccgttgtttgctgactccatccagttgcaattttttcatcttccctgtccgtttatcaagcatacagagtccctcgtgagtcccaatccaaagccggtgagaataatcttcttccacacaaagcacattattattaaccagaagaccaggggtataaagatttgatttataggtacggacctcgtaaccatcataacgaaacaatccatagaaagtaggaatccaaatatatccgtcacggtcctgatacacttggtgaaccatgctattcggtaatccttcaggagtggaaaactgtttgaactctagatcgtcccaacagacatgagctctcccctgaaatattaatccactcattatcagaattatgaatactagtctaaatgttttcattctattttctattagatttcatttagcaaacttacaaaaacctaagaattaaataaagttttcagaataaagaatcatgtataaccctatactatgaaattactcctaatatataatttcccaagaaccaccaatagaactcagataaaaaggcagtcggttcagtatgaaccaactgcctttacaaactttaaaaccatctctgtcttataaacagaaatagtatgaaaaaggaagacttatcttcacccagtaaaaatagataaagaatagaaaacaaaacaaattaaaaaatagatttcaaaagccttccatcttttcctccaattcctcctccgtatccacaatacccaataagcagtttatttcccttcttttatccaaatctttaaaataggtttccaccactttataaagatcaaaatgacaagttgatccggcagccatatccaatgagtccacgatcctttccactgcctgatgaattttatccatatcaatcaaatgcagttcattgctatgaataaaatatttttccataatcattattttttctgtttgtactatcattagaacagtcgaactatggagaatgttttaaaaacgaaagctgctcttatttacatgtcttgaaccgaaatggcagacacaatccttacatcaaaaatccccccagctatacaaccattctttgcctgaaatttcactgttacattttttcttgcttttatatattcagcaggaatatgaatataacatctatacagtccttttccttctttacaaggtttagacaaatcaatagtatctatccatttaccatcaatcaaaacatcaaaaatacgattacccgaatcacttcccaaaagctgtaagcaaacagactgttccatctctttccgaactttcatttcatacataaaatatccacctttagaagcatcccgccaattctcaccagctgtagaatttactgcctccattttatgcattttctcagattcagcatctgcaataatgaccctgtctacagttcttttattcaagttatcctcttcttgcttaaattgctccgatttcttcagctcggccaaatagttctctttcttatcataatgccgaaaatatacggcatagcggctccagtggatagtattaaaaggaaccagctctacaggcttggatactacattatccttactacacaaaaaagccagcttttctccttttttccggataacagcagccggtattttccggatatcccctataaaagccggcacatctatcactggataatctttcatagcaacagtagaacgtgcagatctgaaatcatctttcgataaatgctcgtcactaattctagctgccaaaacaataggcccatatttcaaagcaagataatgagtcgcctcattcaaaggcactatttccaatttcataggtagctctatccgtactttatctccatctttccactgcctgtttattgaaacatatccatccacaccagcctttattttctctctcttaccatttacaattacattgagtgacgaacttcccacccaataaggacaacgtatctttaaattaaaaacagcctctccggaaacagtaagactagtaacaccttcatcaggaaaagcagtttcctgatgaatactgattcctttatcccatgtaactaccgatggtataaacatatttacatacaaggcatcatctgtatgagcataaatcatttgcccaaactttgctgtttgctcaaaccccgtcccggtacaacaccaaaaagaatcatatttagttccataaattttatagtgtcccggtttcatggaagtataatacacacacataccctgatcaggatcatagttggccaaaatatgattaaataagactttctcataataatccactttctccacctcggcataatcacaatataaactctctgtcagacgaagcatattaaccgaattacaagattcaggtcccccgttcaattctattcgatgctcgaattcctcaggagcaaagaaatgttctcctgtactgttacctcccatcacccaagtatgttttctcactactgtatcccaaaagaaacgggcagctgtggtaaaacgttcattactatcataacgataaacagattcgaaacctgtaaatttaggaatctgggtattagcatgccaaccctccaatatatcctttccttcagacatgggaacccacatatcctcatcgttgagtctttgtgcccacttaagatacttctcctcacccgttatctgataaacatctataaaagactcattgatagagccatgctcgcacaccaacaatttttgaaggtcatcatgtgataacttgtcaatgactgaatagccgaaccagtctgccatctttaccaatatttcttttgcctgtaataaatcacatcgcatataaacctgataaagccccaacatgatcttgttcatgacatacacaggttcccagcatttgtcataaggagtctcaataaaaggattagaagtcttgaaatttccatccagcacattctcgaaaatagctctaccgcaaatagtaggtaacaaatatccatcacctccagcttgctggcaaagagataactcctccaagatatagcttaatctacttagaattgcagtatctcccgtagaatcatacatcatagaaattccagacagataaaaccccataatatgtcccggtaaaggtccatgcccgttcatatactcagattcccaaaaaggatagggttgtgccttaggtgtcaaacctgcttctctccgaaaccaagacagcaaacggtcaggttccaaagaaagcatataggcgtggttcaggtccatgatatgtttaaaatcactatccagtaaacggacttcttttaaagagaacaaagaaattttatctccattcaccggctccacctttaccttgttttcttgtgcgtatacaccggaaaagaccaataaggtatatagaaaaagaaatattttcttcatatttaatgtgctttttgatttatataatgagcgataaaaggatgtctattcttccatttgacctccatattcgaaagaaaccaagttttaccaaagtcatcattcccttgataaaataaatatgtttttcctttccttgttttaaagagatgaggatgtccggactcacagcaattccatgttccaggatcaccattcatcagaaagggtttattagaaagttttgtccaatgaataccatcactacttttagcaactccaatctgctgaggacgattattataggccccggcataaaacataaacatctcatctcccatctgcacaacagatgctccttcgacacacttctcttcccaaggatattcgggaacaagcaccggatgattcaccggactcttccatgcctgtttcgaaaaatccgtatgtgcaggtgccattgcaactcctataatttgggtagaataatcaggagtacgagttgcataatataaataataccgatcctttaaaaaaacgacctccgcatcgatggcacgcccgcagttccactccccttccggagaaaaaataggatttgtagcattacgtacaaaatggatcccatcttcagaccatgcatgacaaatagcatctttagcaccattaccatacgtctgatagaatagatgaaccgtatcatttcttaccaaagcacccggagcacataaccctttagactcataagctgtttgaggtatgatttctccaatacgatgccaatctttcagattcttgctcccggcaatgcctattccccaaccttgcgcttccgcgtttccattctgctttggaggaatagaataatacatcagatatttaccttggaactccactacatgaggatctttagaaaaaggtattccaatacggcttgtatctccatacatcatttgtttttgggctaaagaacaaaacacgcatatacacatcaatccggtggtcataatatagcgtttcataggcctattttttttgcttctgcattctgcaaccaaacacacctccagcaatcataccgggcaaagcctgtatcttaacagttacatgacttttcccccgagttaaatcaacaggaataggatacactttatcaatccatgcactaaaagtttccacccgtaatttttgctcccctatcttttcatgttcggcaaatatctcgaattcacgatttcctccatctgtactgctataagtcaaaaccaattccatcggttgaaccggatctactctcagggtatacgaaaaccatccaccatccgaggcatcacgccatgtatttggtcctcccgtatgagtattctcacctttcaactgatgcgcagtttccgaactttctttaccgataaaaactttatccgtaatacgggcacgttcttttagctgatctttcaatatattctcatcggaaggaagccacacagccatttcaccatttcctctatgagaccgtgcataataaggaataagcaggatagaatctgtcacagactttatttccttaaaatcattctcggcaataatgcgttctgtggttcctttcaatatctccacacctcccaacatagaagcaggagcagcctcaaaagccgtttccggtttcagcacataattcaatacagtccctccattgtcagcaaactctgcacaataaactatcgggccacgctctacggcaagatgattcacatccgtagcaaccttatcatttgctgaaaccttgtggacatccatcggaagacttagttcaattgtatccccctgtttccaactaccggataaaacggcatatcctttctccattacaaaatcccggggttttccattgattgtaatttttacggctcctttatcatgcctggtataagtataaagatcggaaggtacaggctgactatttacccatcccggaatacgcaacataacagcaaaatcttccggggtttccggagtcaatatcaactttatctttccattccacggataatccgtctgttgttccacctgtacatgctttccattctttagaactacatcagcatggttggcaccatacagattcacataaaatcctttggaagaagtggcatacacataccctggcaccgaaggaataaaacgagctagattagaagggcagcaagaacaatcaaaccattcgctacgctctgagccattttcatcgcaagagaggacatttggataaaaaaacttctttccatccagactaatgccactcaacaccccgttatacaaagaacgttccagcacatcaatgtatttggcatcaccatgcagcatgaacatgcgtaaattccacatgcaattggcaatagaagcacatgtttcacaataagctgtactattaggcaactcatagtttttaccaaacgcttctccatgacgagttgaaccaatagctccggtaatatacatcttcttccctactacattgtcccataatttacccacagcattttcaaaatgccgctcgtttttcaaagcggctatatctgtcatagcagcatacatgtaggtagcccgcactgcatggcctacagcctcatcctgagcaatgactggcttatgatcctgccaataagatccgctacggaactgatcctcactattccgatcatatttgtcatactttccacgagcctccaaaaagaattgtgacaaatccaaataacgtttatctcctgtcaccctataaagctttaccagcccaatctccacttcctgatgccctggcgctacagtaatcttttcttcttcaggaccaaaggtattacacaacaaattcgcactcttaatggctatatcaagaaatgaacgttttccggtagctagataatgagctacagccgcctcatacatgtgtcctacattatacaattcatggctgttgtcacgttcattttcccatcttttactgccagcccacggatgttgcgaatccccgccaatagtacgggtagtataaagataaccatccggttcctgcgcagctcctatcagatgaatcagactgtccatatacatatccagcgctttatcctccttcaccgccaacaagtaagcagctccttccattatcttatacacatccgaatcatcaaacggataaggggaattgaactttccttccatcagtttccccgctactgcaaaattatctatacgatgagtttcctcacatttatgaaaagcaaaaggcacggtaacactacgaatggtttcaatacgagatgcccagaaattatcagaaaagtgtacattggtaaaaggtacatccttgtattgataatcagatttattgctatccgtcgacttacacgcggcaagaaccccggcgacgaataatataaccaacgtttttttcatggtaatctatatttaaagtttatctataattcgtatctgaagtaattttcaattcatacaatcctccggcattcttcccttgagcagcacggaaagtaacattcactttatcctttccacgagtccagtctgcaggaatagaatacacatcgtccacataggtcagatatagttttcgattcaaactgacagtacgtagatagttgccgtcaatcaatatatcaaactgacaagtatcaggctcgtctccccagaaacgacaaatcagatgataaggcttttgttccgttttatttatatgaagtgtgtaagaaaaccatccgtcttttgccatacggaaccgagtattctttgcccaaaaataatcatgccaataaatagaatcattctccccttgcaacgcatgtttcccttcatctttctcgtcaccgatcttcacttcatccgttaaagaacgagtacgataaacaaattcatccggagaataaagtttccaatatacagtatgccgctgatgatgcatttgaaaataagggatcaaccctaccccttgttgtccacctccattctttactgtaaaccgtaaaggatgttgtgaagaacattgtatccagctatccagatcggccaatggacccactaacataggaatattctttgccggaagcgattcacgacaagcacgattgtcaataaccttatcttcgggcatatcatccgtccccaatcctcccgcaagcaatatcgggccatacatgacagagccgaaatgaggttcatcctttgcataatcaatatataagttacgtgtgaaaaccaatgttatcacatctccgctcttaacagaatccaacaggcgaatgtagcttcccttatgtgcttccgtctgtgccggctttccattaatacgaactacagcatcaccgctcacccaatccggataacggaacagaagcattcctgtatagctccctatttcatccatccttactgtaaccgtatccgactccgggaaataagtatccaaagtcagcttcaaacctttttccttccagtggagacgtgaaggaatatacagattgaccagcaattcttggttatccttaaaataaatggattcggcatacttagaatgattctccatccctgtacccacacaacaccagaaagaatcaaacggagtactatattgcttaaatgatcccggcaacaaagaagtataataagtcacacagcccggcatatcaggatcttgtgaagcaagaatatggttatataaagcatgttcatagtaattcagatatttataatcaccatccaacatgaacaactgtcttgacaatttcaacatgttatatgtattacaagtttctgccgaagtatagtccagccgcttgctttcttcacccggtacgccaaaacgctcataacaactatttccaccgatggccaatgtgtgatctttaattacaatattccaaaagttacgggcagcctgataataaatatcattgggtgagaactcatactctctggctactcccataaatttaggtatttgatcgttagcatggcgaccgaataacacatcttctccgttagcaatcggataaataacattgatatgattgaacctttctgccgtctgcaaaaatttcttatctccggtaatactataaatatcaacaaaaacttcattcatccccccctgttccacactcaaggtactttgaaaaagatccctattgctattcaaggctatatgagaaataaaatccgccaaaggcatcaatatatccttggcttgcctacaacctgcatagacatatgcatccctcaatcccgccaaaatcttatggatacaataccatgagttcccattctggttataattccaaggttgtccggtttcatccggctggttaagcaccacattcccttgaagcaactgcaaataaccctcctttcctcttttaccggtaatgaaccaaccatccggggtctgtttttggcactcttgcagttcatccagcatataattcaatttatccagcaaggctttctcgcctgtagaagcatacatcatggcacaagcagacatataatgaccataggtacatccaccatgcttctcccatcctccgtaattatctcctttcccctgcaaaccgacactacggcgtacgtgtggaatgagcctgtctacatccagcgacagcagatatcctttatgtaaatccatcgctttcttaaaatagctatcggttaattcgacttccgacagtgcaaatgactgccataccggaacatgtacacgaggtgctttgcgcacctgctcatattccgatgcagtcaacttgatcactcctaaaaacaatatacttaaaacgaatactaacctatattttttcatggtaacagattttataaaaaacacaatcaatgaatcaattcaatcttacagaaatcagcaaaggttccgtctccccctttagcacacaagcctatgcggaagcccattccccacggaacatacggcgaagcatctatttccgttgccaaaggtatccacctctgccctttccggaactcaaagcaaagccaatacccgtctttcacagtcatcctgacctgtgtcgttgctgacaccgttatagcactttgggccaagacatcaactttaccatctacatttttccatacttccaccttatctttcaaaactgatatgccaataccggctaaaggagcgccaaatccattatgagctccaccaataataccgataccagccgcagccatacttttccggttatcaacagtagcagtcaacgaaaaattcaaagccttgacaggttgtaccagcagagtacccaattccctgttttccatagatgctcctagatgtaatccgttttttcctgtctgataatctattttctgggttaccctccattgccaaatgggagctagtgtattacccttaaaggaatccacataatccaaagacaaattaggacgattataaacggcatcgttcctaaaataaggccagccatcctctccccaacacaattcctccaacacgccctgacgtccgacatataccgaaccactcctattataagcatgatacaaataaaactcctttccatctttccgaactatagtaccatgtccgggacaacgccaatcctgattgtctaccagtataggattcttttcatacttctcccatttacccagcaaagatttggaacgggctactcctgttttataattacattttttatcacaacagctagctgccgaatacaagatataaaaataatcctgctttttaaaaacacataccccttctaccagcccttcctcccaaggagtgtcattacaaaacaaggaagtcatttctcctatcagacgggtacggtcctccgtcatctcctgtgcccaaatatttgtaggcaagcccatactgttgccgtcttctttccatataagataaagtttacccttctcatctcttgcagcaaaagcatcaatagagcctggttcctgagcaaccaacggtcccaaatctttgaacctccccatcggggaatcagctaccgccgccgcacacgataatctctttgtcctcttgtcacgggctgtataatacagataaacctttccctgtttctcatcatacgataattccggggcccaaaaattattcaatgcccaatcaggtgctccatccggaaaaacataattcaccaattcccagttcactaaatcttttgatttaaaaatagggaacaacggcgaccattcattagaagtcgcagcagcccaatactctccatttatttcaatgacagtaggatcaggacgatcacccggcaataccggattaataattttttcgtatccaacggcttgcacatgtacaccgcaacatcccataattgtcaatagaatcacaaataacagtcttttcatagtaatataaaattattcataagttacaggaaatgccgagatacgcaaacgggcagctcccatcggtatcaaggttatatcttccaatatttcacttttcggagccccttcttccggcaacacaccacataagccatattgatctatgccccaagaaggcactcttctcccttgtgcttttatcactagaggaacgttatcagcagtaaaaggataattgtctgaaggccattctctcttctcgactttcaagcattgctccaaaaccttatcatccaatttcaaagcatagttccaagcactttgaggatagatttcataagtaggccaagcattgacatcagcacctttctgccatttagaatcccatatagcattttctgcactacttacctttctatactcttcctctatcaatagagagaaagtcaaaggaccgtaattcacgctggcactgttttgattggtctgccatctttgaacagataaagacatgggtaattgcaagattaccacatctccattactccaagttctatccaaacgaacatatttaccagactccataccagcagctaccgtttctccgttaactattaatgtcccccccttgcaccaagcaggtacacgaagatataatggaaaatccactttaccggaaacttgcactgtaaaccgaatcatttcttcaaacggatagtttgtttcttctctcagaataacttcagtaccgtttacccctactttcgcctgtgcacaacacggaccgtaaataatggcggcgagcccgttatccggagttgcataaaccaaattttcaatatagtaaggccagccttgcgcatggttatgctgacagcaacgactgctgaaaggattcatagccaagaaaggaccaccattatcaattccgggtttatggtctttagaatcactcaccacctgattgggacaagtaatatatcttaaagctttgaaatcaggcattaccgccgccggataagaattgaaagcgacctcctcgcaatgctcagcccaaaaaggatcaccggtcatacgaagcattatctcatcagacgccatctgttctacaaatccacaagtttctgtaccttgtcgtggatcaatataagccaaacgggcattctcgtccgctccgaacatacctcccggcacctgtccgaaaatacgtctcaccagatgatgcactcgataagatgcctgcaaatctgccgaatcaccactaagcatatagtaagtagccggttcacgaaagcactgtgcaatattcacattatgccaattaggcaaatccgattcatttgtccagtctgccgtattacgatgaagtttccgagcaagctccagcaggaattgttctcctgtgatgttataaagccaataaacactatacagattatcccccccacggctgttctcccaataatcttccaaaaatttatcatcggggacagttagttgccatttaaagtaatcagtcatcaaagtcaacactctcttatcaccagaatattcataataagattgcaaacaccaaagcattaccatattcgcccaaagttctctcttccctccacgttcattcaccggaccgaaaaagccatccggttgccggctctgaatagctgcttcaatccagacttttgtttctgcaatcatagcagaatcttttaagatataagccaaatcaccatatcctttcagccaataagggacttcttcccaaccatgatctccaccagacagcaaccacgcattatccttcttatccaaccacgcactaatttcacccagtttcccggttaatccctctttttgcaacagcaggtactttttcagccagccttccggctcaatggttcctaccggcaattttataaaatgcaatggtttcaaaggcaaacgatttccctgataactgacattcctatctatcgtaccgggacgtgaaagcatatctatcttcatctcccttttttcctccatacatgctgtcagtacagccacaatcaaaaaggaacctaataacaatttccctatatttctctttttcttaaacataccgttttttattcaaattttacatcagcaaaagtacatctgtccctgagtttcatggaaaagaatcttgtcagaaaaagaaagaatataaccattttactcattcagaagtttttcagcccatatcatcgtattttctttacttttaatccgctaataacaccttgtcctttttgaggagaaagcagaatctccagtccttcatgattccgcacattgaccacaagtgtctttacaacagctgtctgctcgccataagaatcagccagattcaatgaatctatcaatttttctccattgactgacacatcaaatacacgttgtccctcggcagaaacacctgtacgcacaatatttttccgttcatccttactgaaaggttccgtgaaataaaagccaatttcatatactccgtcaggaacatccagccggtaacaagtcgtaccaatcaaaaaggtctgaaaaagaggctctaaaaaagtattttttatatcagcccctactccatacctaactccatcatgtgatgatcccggccaagagttaaaaggttttccatccatatatccccaacttccctttgtataaggtttatcgggtatccatatttcctgaagctgcgggtctataaaataacaatgctcctgtcccaaattaatacaaagaccgtccaaaagcacatcactgtcagtaagacgggaagataacaatttcatctgtatcttcagcctgtctgaaagtgccccacttcgagcatccagcagattctctccgtttataaaaggaactgcgaaaacagcttccccatttaccacttcacgcacacccaaagactttccattatgaattaactccaccgttttctgattagaaaaaacactgatcttacgcacatttatactatcatcacaaatttccacccttttcgtccaatcggccccggcaatatgaatcatcggaatgtccgaccaacgagcctgacagtaataataaatctctttcttccgacgatcctctgtcaacattcctttttgattcagattaggcttgctatcaccacgaccatccacctgaaaatcaaccaaattccaaatagaataacctatataatccggacgtttctccatttcattgatatatctgcgattaaaatccaattgaaattccggagtaaaatcaaatgtacgcggagtataagaatggatacgttcatcgcttcctgctccaaattccgacaaaaaacgaggttttgcagtagaataactacaaaatttatcaaacataggtgcaatcgtagcagaatctccctgataccaagactcatatacattcaccccgttaacatccgaaatactaaacatctccttactagactgtgtatagggtttctcccaagtaaaagcatgaaaggcgacacaagaaagacgataaggatccagctcttttttcaaagcctccaattccctagccaacgcaatagcttgcttatggtaatcccataattcattcatagccccccatagtaccaccgatggatgattgtagttctgaagaatcatctctttcaacatttctttgcagttatgagcgaatgccgtattttttctcacttcattcacaacacaaatttcagaccatactatcaaccccaattcgtcacaggctcgatatatttccggatcttgaggataatgactgatacgcacaaaattagctcccatttctttcagcaaccgcatatccctacgattcatttcaacgggaatagccgttcccaaacctgcataatcctgatgccgtgcagctcccctcaatttaagatacttcccgttcagataaaagcctgtcttgtccaccgaaaaccatctgaatccaaccggagaaattacttcttgatacatttctccattcttggcatcgcatacctgcacttttaccgtatataaataaggcaattcaggagaccacaaatgaggattctctatccttcctacagaagtggatataggatatttcctgcctggaatcagtttcagtttcaactgtttctctttcacaatccgattcatttcatcgcaaagaaaaacattgacgtgcacgtgctttgtatcggtaaagtcatttttaagaaaagccacaatttgcattgacgcctcagataccgacacttcaggggtttgtatccttactggaacagctgcataaggttctgtcacaaaatgcactttttccgtccattgcaagaacaccctgcgataaatacccccaaaaatagaaaaatctccggaaaccggtggaaggatttcccccaaagaagaactattatccacttttaccgccaacagattttcctttccaacttcacagatatcagttatatcaactccgaaagcggtatatgcccccaaatgagttttcaataatttcccatttaaatagacgtctgccttgctggccactccatcaaaacgaagagttattttcttatcccgtgcctctgaaggaatgaacaacttcttcctataccaagatatgccacgcctatatccccgttgctcgtcaatcacatctccggcattccaagtatgaggcaaatctacagttacccaatcagaatcattccaatccatactggaaaaacgttcatcattctctgctttatacttccatgaatctgttatagaaatttcagaggcacatatacaacatatacatccccagaaaaacaacaaccaaccggcaaaccttttcataccatcacttcaaataaatattaaaagaaaaagactgtccggaaccgcacatgacaaaaagtgccaaacaggttttcggacagtctgttcattaccaatccactaatatcccggattctgctttaacttaccattcttatccaattcagctcttggaataggatacaagttcttatttatatcatttgtagcagaatgagaaagccatgatttagttgtccatactccaaaacgaatcaagtcctgccttcttcttccttcttggttaaactcccaacccaattcatccaaaaagcgaccatattttatatctgctccaccttcatgagttgttctaggacttttaatcttgtccaaataggttgtttcgcgcaatccataatcataggtactccctcccatcagttccgcaccagtgactaccgctttttccggagcagacttgaatgcgcgttgtctgatttctgttacaatttgtgccgcttcgtccgcttttccagtccttaacaaacattcagctttcatcatcaatatatctgtatagcggaaggggaaaacatcgttactcatagcaccaggagacataccggcaacatactcatactttgccaaatgatatccatgtaattcctcagcccaatcaacccccggaaccacatttacaatattcataggaatcccctgactgttgcctatctcgcacaacacattggaaccatcgggatacacttgctgtcccatcaaataattctcggtcagacgactgtcatccggatcaaatgtatttataaattgcggaacagcaaccgaacctccccaaccaccaaaactcttagtggaatatacctgagagaactgaccgtttagagcgtaattgaatatattcaatccaccggcgtaactttgatcaaaaggaacaacaaaaacagcttccgtacaatcctcattatcagccttgaatacatctttctgatttcccgccaacgagaattgtccagattttatgatctcctcacaggcatccagacacttttgccattgtggggttcccgtatacaccgccgcattgatatacatcttggccaataaagcataagcagcccatttggtaaaacgtccgtaagtcgattcatcaacattctccggtaataaaggaagggcggctgtcacttcggcaatgatagaatcattcaaggctttacgactgatttgttcgggaagaaaaccttgagggacatcaaaacgggtcagatagggtacattgccgtaataatcacaaagcatataataataagaagcccttaccgcttttaactccgccaaataattatccttaccttccgtcacaggcaacaggccggattcaatctggtaaattacctgattggcattgtttataccagtatacaggtcaccccaccgattaacagcctcacctgtctccgaagtccaggtatgtaaatgcatgttaatggtagtcccattccatccccaaggatgtaccggtatcatggtctcatctgtagaaatggtctgcgtttcatttattgcaccgataacaacagaacgccatggagtataagcattacctaatatggcaaccatgtccttttccgtataatgatatttatcggatacgatcgtagtatacacgctatcgtccagttccatacaactattcaatgatgctcctatcagacaacaaagtgcaggacacatcaatgctattcttattcttcttttcatgttcttcaatctaataatttaaaaattcaagttaacgccaaaggtatatgaacgggtagtgggatacttgtttctgtcatctgttcccggagttaaaagcgaaccgcctacctccggatcaagtcctttgtatccggtaatggtcaaagcgttttgaacagagaaatacagacgcattcccttaatccctttaataaagtctttcttgaaattataccccaatacaatattatcaattttccaataatcaccatcctccacatagtaactattaaattgcttggagtccgtcagcaccgctttaccaaatactttttcatacccggctttcaaattattcattgcctggtctctataattctcataatgcagacgagtaaagttgatattctggaatccaaaggctcctctcatggtaacgctcaaatcaaaatttttataacggaaatcattgttccatcccaaataatgctttggcaaaccattaccaatcacttttctatcctctatcttcacatctttagactctacagcattaccattctgatcttcataaatccatttaccgtcttctgtaatatccaatactttccaaccccaaatctgccctataggctcccctacttttacacgatgggtagggactcccgacataggcgcttgtgcgtcacccacataaaaataatcgtttgccaactggtatttactattattcaatttgtcaagcttattcttattagtagaataagtcagtgtggtattccaaccaaaatcttttttattaaagacaaccccgttcagcaatatctccagtcccttattactgatagtacccacatttgccagtgtagtgccatatacattgggcggaacaggaacaggataattatataacaagtctacagtttttctgtaataagcatcaacactaccactgatacgatctttcagaatagagaaatcaagccccacattaaattccttcttcttttcccatgtgaattccggattcggattactctgcggagtcaatttattcacccattgaccattataataaaaagtatcattatttgaagtatatcccaaacgataggttgccaaataaggattggaaggagcaatacctgtcacaccataaccggcacgaagtttcaagctattaatccacttgatatttttcataaaattctcttcattaatccgccatgccagacttacagccggaaatgtaccccaaacctgatcggaacccacaaatttggagtctgcctcatgccttacactaatggtagccaaatacttgcccgccaatatgtaattgatacgtccgaaaaaactgataagattacctgacgttttattactgttaataggaatagcagcaccggcaatatcgctgtcgccacgtcctaaagcgatattatcccagccaaactggtctgtaggaaaattccagttctgcatccaataatcctcccatatattcttctgatagccataacctcccaatacagaaatattatgaatgccaaaaacttcactatactgagcggtaaattcaaacaactggtctgtagtctcacaagtacctctggaggcaaaaccatcacgggaatgagccactgtggtattgaaattatcaaaagtctcacgataaccccttgtttcgtaatatctatcccaagataacaaagcattgaatttcaatgattcgatgggttggaaagtaacattaccattcaatctggtacgctgtctgtgatgtctgccattagctgtctcgatagtactcagcggattggcgatagccaccagagccgaaggctgtgcccaaggaccatcatactccggcattgatgacaggacatccttatttacatcctgcttataaataggcaaggtaggattagtaaccaatgccgcactatatacccctctattgaaagaggaaccatctccggtcgttgtatagttctgcgtattagaattaacgctgacgttcaaacgcaatttatcattcaacattgaatgattcaccgccagtcgtacaatcaacgcctcattatctgactttttgaaaattccctggttctttttataattgacattcaacaaataattagtcttctcggaaccaccctttacactcagattatgcccatgattgaccggagtacgagttatggcttccagccaatctgtattacctccaaaatcagtagcagaaattgttccatcctgaattaaagaacgaaattcatctccagtcaacactctttccgttttcacaaactcttctgtaccgacatacccattatagtctatggaaaaaatcagaattagccttacgggtagtaaccaaaatcaccccattggtagctcgtgtaccataaatagccgcagacgaaccatccttcagcacatcgatttgagcaatatcctcaggagccaccgttcttaaatctcccggaataccgtcaatcaacactaatggcgaattgttaccctgcaaggagttagtaccacgaagtaagatagacgaattctcggtagggtcacctgtagaattcacaatgctaagaccagcaattttccctttcaataattgccccgcatccctcacatttccacggacaaaatccgaagacttgacacttgagatggcagccgtcagctcacttttcttttgcgaaccgtaacccaccactacaacttcctccagcgccagagaagaaggtttcaactgtaccttgacaaaggtctggctacccacatttatctcttgggcatcataacctatataagaaacaatcaaaacagtattcttatcacttgcctccacactaaaattaccatctatatcggtaatggttccctgagaagtacctttaagaataaccgacgcaccgatcagtgcatccttatgttcatcatataccgttccctttattattctgctctgagcaaacaagcattgggaaacgagtaaaaacaagcccaacatcaacatcgttgtttgtcgatgtccaaattcagacggatgtgcacctttactaaacatgtttttcatatttgatctttaatttaattacagcccaaaagtagacttattagataaaaagccacaagaatatccatccaaataatatgaattttctgccaaaacaatattttcacccaccttttacaccaccttacctcctccaccttacgaaaagagagcaatattctgccaaaacaggacaatattttgccttccccttgtgtttttcagccaaatatctacttttgcacatagtaaaccacttgataaaacaaactatgtacaagcacttattccttctcatatcaatccttttcagcctgtcatccccctgtgttcatgctgaaagatattatttccaacatttgggtctgaaaaacaaactgtctcaaagttccgttctttgtatcacccaagacaggaacggattcatgtggttcggcaccaaagacggactaaaccgttatgacggatccaatttccgtattttcaaacacaatcattccaaccctcattctttgggtaataacaacgtcaactcattgcacgaaaataaggatgggaaattatggataggaacagacgacggaatttatatctatgatccattgacggaaactttctcaaaactcacctgcaaaagtcaggacagcttgtgcatcacccagcccattgtacaaatcaccaccgatacacaaaaaaacatctggatagcagtagaatcccaaggcgttttcctgttcgataacgaccgacaaacattaacacactatgctatccccgatgcccatctactcagttctatctgtatagaccagcaaaacgcagtatggataggctataacggaaaagggctttattatactgatgatcatttccagaacttccggttattccaaacacaagaggggaaaaacctcttcaccgatgaccagattttcaaaattttccccgaacagcataataccttgtacactggttccgcaaaaggtggtctgaaaagtatcaatatccttacccggacagtcaccgacttgctaccggactcttcccaaaccgaaagtatctttgtaagaaacatctatcccatcgacaaaaaaacattgtgggttgccacagaacgaggaatatacacttacaacaaggaaacccgggaaatccaacacctcacctacaatcccaacgatgactattccttgtcggacaatgccatttattccctctacaaggatgctgaaggtggcatatggatcggcagctatttcggaggcatagactattatcccacccaatatgccaccttcgaaaaatactatcccatcataggacaaaacagcctcagcggaaaagtagtccgtgaattttgcgaagatgaagacggaaatctatggataggaacagaagacggcggcttgaacaaattcaatccaaagaccaaagaattcagcccttgtccactggcaggactgcactataatgtccacgctctaagtatggacaatcacactctgtggataggtacatattccaaaggattatactcattggatctgaagacccgccgttcccgtcactacctgatgggacatgccgaaaatacattgaacgacaacaacatctattccatgtgccgcacctctgcaggtcaactctacataggtaccacaaccggactcaatctctataaccatgaaacaaatgatttcacccgtatccacaaaatggatggtatctttgttttcaacatattggaagacagtaaaggaaatatctggtttgccacctataactccggtatattcaaatacaatcctagaaataacagctggaaaaattatgtttccactcccggagttccccacggactcccttacaacaaggtgataagtatttatgaagacagcaagcaacgcttgtggttcaccatgctgggaagaggattctgctcattcaaccaggacacagaggaattcactacttatgattcttcacaagggcttgccaatgatgtgatttataagattgtagaagccaacaatgacatcctttggctcacctccaacaaaggattgatacggttcgatctgaagaccaaaacctcgaacatttatgcagacaacaatggactgctcaccaatcagttcaattatagttcaggaattaagagcaaagacggtaccatctatttcggatgtatcaatggcttcattgccttcaaacccgagtccttcaccgaaaacacttattttccacctgtagccatcaccgatttcctgcttttcaacaaaagcgccgatataggcaccaaagattcccccctcagccaaagcgtgacttatacccgggaaataaacctgaagtataatcaaaactcttttgccttccgctttgcagctctttgttacgccgcccctgaagaaaattacctgagttatacattgaaaggatttgataaagagtggtacagtaccacaaaaagttccaccgcttcctataccaatctaaagccaggcgactatactttctgcgtgaaaacagctaacgccaaaggagaatggagtaatgacatcaaaagtatccacatacatatcgcacctcctttctggaaatccccgtgggcctatcttctttattttatgctttcggcagccggtatcggatatatcttctatcgcttccgaaaacaaatcacggacaaacaacgacgacaactggaaatcttagaagccgaaaaggaaaaagaaatttatcatgccaaaatagacttcttcactaatatagcacatgaaatccgcacaccgctaaccctgataaaaggcccgttagagaacatcctgcacaaggaaaacatagatcgcaacaccatccgtgagaacctggacgtcatggaacggaataccctgcgattacttgacctgaccaatcagttactcgacttccgaaaaacagaaaccaaggggttccgtcttaactttatggattgtaatatctcccaactaataagagacacttatatccgtttcaatcccgccgcccaacagaatgggttgaaatttcaaacagacctgcccgaacaggatttcaatgcacccgtagataaagaagccctgaccaaaattctaagcaatctgttcaataatgcagtaaaatatgccacatcatctatccatgtatctttaataccaccatgcggcatgaaagaaccgggatacttctccattatggtcagcaatgacgggcatcccatcccccacgatatgcaagaaaaaattttccagccttttgtgcaaatcaaacaaacctccggtgggcaacgcacagccggtaccggcatcggcctgcctttggcacgttccttggcagaattacataaaggaaaactttacttaaaggatagtgaagaaatctgtttctgtgtcgagcttcctgtcgatcaagaaaaagccatacaattacaaaaagattccactatcagccagaccggcaatatgcaaacagtcatccggcaacacagcactaacatctgtattcttgtagtagaggatgaccccgagatgcagaactttatttgcgcacaactggaaactgtatattgcgttatacgtgcatctaatggcaaggaagccttgcaagtgctatcagaaaagacaatcagtctgattgtcagtgatgtgatgatgcccgaaatggatggtttcgaattatgccatacattaaagaccgatatcgaacatagccatattcctatcattctgctcacagcaaaagttaccatgcaatccaagatagaaggaatagaactgggagccgacgactatatagaaaaacctttttctacggagtatttattggcacgcatagcgaacttattaagcaatcaggacaaattgcgccatgcttttacttcatcaccttttgtgaacgccaaaaccattgcactgagcaaagcagatgagaactttttagacaaactaatagaagtaattcaaaagaacatttcggaacccgattttaatgtggatatattagccgagaaaatgaatatgagccgttccagcctgcatcgaaaaataaagggaatcgctcaaattacccccaatgagtttattcaactggaacggttgaaaatggcagcccaactgattcaatccggagaatacagaatcaatgaagtatgctatattgtcggtttcaactcttcttcctattttgccaaatgttttcagaaacaatttggagtactgccaaaagatttttacaagaacggctcctgacactgtaagataatttatatatgcgtataaaatagtccttttaaatttggcataatgccatgaatccattacatttgttccatatcacaaatgatagaattatgcaagatataacaaacggacgttgcggttggtgcggaacagacgaattgtatgtgaaataccatgatcaggagtggggaaagttagtaaccgatgacaagacgctgtttgagtttcttgtattggaaagtgcccaagcaggactaagctggataacgattcttagaaaaagagaggggtatcgtaaagccttctgtaattttgatgccgagttggtggcacaaatgaccgatgaagacgttgagcggctaatgcaatttgagggcattgtaaaaaaccgtctgaaaatcaaatcgacaatcacgaatgcgaaactattccttgccgtacaaaaggaattcggcagtttttataattataccctgtcattctttcccgacaaaaagccgattatcaacacattccggtcattgagcgagattccggtatcctcccccgaatccgatgccatgagtaaagatatgaaaaaacgaggtttcaagttcttcggaactacgatttgctacgcccatttgcaagcttcaggttttatcaacgatcatttgacagactgtatttgccggaaagttccacaacagaattattaactctgttaacactatcatcaccttttatcggaaacctcaatatgtcttttcctccttttcttttcgagaaaaatagcaacgatatgacagccgggattgaattcaagactataagggtatctgtaattcaatagtttcatgcatatatcttgactgagccgaaaagaaagagatgttctgttcccagattgcataacaagacattttttggctttgtgagagcagttgctctcaccttttggggcatctctcacctcatctctcaccctttaaacgctttattcatcgggggaaagtgataaaagatgagagcatgagagataaaatgtgttttttgcattgataggagtagtcccgaaagttaacggcataactttcggaaacaatggaagaaacttcctaaacttatgctgtcagtttgtaaaaacctcccgtcgtgaaagggaaaatgttccgaggaaagacaacctgttttatacgaatgttcatgcggcacttcatgaacgttcacgtaggactatatatacgtccgcgtgaggttacacatatatatgtgggaatcatcaattttttgttcatgtacaaaaacacaagttcctatgcaaaaaagataaggatgttttttaaaaacataagttcattttaaaaaaagaacaagacctttttaaaaaacgaacttatgttatttaccaacttttgcaagctaaataacttctctgccaatcatcaagatacaccttcaccggaaatcaaacttcagcctgacaggcacacttaattgtaaccggcattttgcccgaactcttctttattgataatggcatccagttgagtctgaggaataggacgtagcaaatgatgctcttttatattcactttcgcatccggattgtatgcttttactctttccagcagcttaccggtacgcttcaaatcgaaccaacgttgctgctctcctcccaactcacgggcccgttcatccaaaataaaatccaatgtcaactgttccggctttatctccatggcggcttccttgccgggaatagctgctcttctccttacctcattgatataagatgttccagaggcattatcgttcaagaataattcagcctcggcagctatcagatacaactcagcaagacgaatgaccacaccatgtctcacacttcccgtataattcactgactcacgagacggatcaaggaattttttgaaagtcacattctgaaccctattcttgacagagccatcggcattgtaaacaaaatccttgtctatggtgatataatcgtgtttagcttcctctgcatcggacacactatatttagtaaagaaaatagccgtatctcccggtgagatataagtactgttcgtattgttacaaatccatgcctgctggaacacatcatcataacgggcatccatcttttcatcgaacaggttcagataatacagcgtaggcatatatctgttgaaactgcgaccatattctatggagcgcgtaacaggtttcttaccgtctttatcgagtacctgatcataacacatcacccacaacagatgtgaagggttattacccggtgtcctccaaatgatggggttcccgtcaggaccttcttcaatggaagttccgaatatctcactctttgtgtacatacaaacaaacacattctcttttacatcattacatttataaatatcacaaaggtccgaataatcttctgccaagctataaccataattgttaatgacattacgagcatatttcaacgcttcctcataatttttattatacagataaacgcgtgccagaaacgcttctgccgcacctttggtagcacgcccgtaatcggaagtggaaaccggtaatttagccaccgcctcttttaaatcggctataatctgagtataaaaatcctcttcggacgaacggtaaacgtaacctgacggctcggtacattcttctgtcgttaaataaacacctccccatgtctctacaatatgccatagataaagagcccgcaagaaataggcttcccccatacggatatctttaaccgaagctgaaagttcagagctaggcaaacggttcaaggcagtgttacaagtattcaatgccgaatacaaacgttcccactctttagttatcgcattgctggaaccttgtaatgacgagttataatcggaaagctcagcttcggcacaaccatttccccgggtaaatatatccgttcccaactctgtcattgatgtggcatattcctgtccataccaaaaacgcaacggtgtgtaacatgagttaatcagagcttccgcacccgattcggttttataaaaagtatcagcggtcaatccgctgggattttcctctgtcaggaaatcattacatgagctcaaggttgccgccatacagctgagcaaacaccatttatataatttattcatacctgttcgcttgtttagaaatcaacattaataccaaatactgcttgttttgtcatcggatagctcaaggagcctcctcgttcgggatcataattgtctaaatgactgaaagtaaagaaattctttaatgaacaatagatacggatattagaagcatgaatcttcccgatccatgatttaggcaactgatatcccaaagtgatttctttaatcttcaaatacgaaccatccacgtatcccaatgcatctaatttggaagaatccgaataacttttttccggacggggaaattcgttagtaggattctccggagtccaatagtttactttaatacccggatctccctgaatacggtatgagccgtaaccgttggcttccgaatgtaacatttgcccttgtctccaatacatgaaaacgcgcaaatcaaagttcttgtatttgaatgtattgttcaaccccattacgaaatcgggagtttccgagcccaagatgatacggtcattatcattgtctattgaaccatccttattctggtcctttatttttatacgtcccggcttctcaccatacttagctgcttccgcggcctcgtcaagctgccaaataccgattttctccaatccataatgtgtcttgatggaatgccctacaaaccaaccgttactgatatcacggtcagttccatctgccagctcagtaattttctctctgttcaaagtaaatgtataatcggtattccaagagaaatccttttgattgaaattttgggtattaataactaattccacacctttattctcagtttttcctacattatcccatgccaaagaatatccggtagaactaggtactttcttctgcatcaacaaatctgatgtcttttgttgataaatatccaatgaaccactgatacggttattgaagaaaccgaagtcaataccgatattagccgttgctgttttttcccagcccagattataattcggtgtcaaagctggatagtagccataggctccgttttccgtattatttatgagataagcatacatggtctttcccaatcctccctgagtctgataggcagaaacagcactgtttcccgaaataccataactcagccgaagtttcaaattggaaagttgttctacgttcttcaaaaaattctcttcattcatacgccaagccaaagccacagatgggaagaccccccactgatgatcttttgccaatacagatgaaccatcctgacgcaaagtcacagtcatcaggtatttctcattgaatttgtagttgatacgcccaaagaaagatgccatagtggtttgtacataactgctggatatctgctgactatcctgcaaaccacccaaattataaaacaacatagtggatgaaataaggttatgccccgcacccttatattcctcggccacatttttatataatgcgttaccagccatcagactcagattatgttttcctaatgtgaacgaataagccaatgtattttcccacgaccaattgacgtcactatgattggtagcatccgccaacgaataatttcccgctccgtctaacgtatatgtatcagcaaaatgtcctgtacggatatctttcttgtcaaagccaaaagtagaagtcagtgtcaagtccttgataatgttccaggtagctcctacattccccaccaaatggctggtcagccggttatttttataggctccgggaacttcttcggctatggggctaatggtctgcccatcattaaaaggaagcacattgatagaaccatcttcattatatacatctccatagggagcgtaataaatagaacggttgaaaggatcacgtcggatattctgatccaaataggtatataccacattggcattcaatttcaagttatcagtgagcttatgcgataaggataaggttgcattataacggtccatatcatccatcttcaccaaaccgtcttcggacatatattcaaaagccagattgaatgttgttttctccgtaccatttgaaatattgacagaatgggacatctggctacccgtttgcatcagcatatccacccagtctacattttgattggattttaccgcatcataagcagaaccaaaaattttggcatcatcttcaggacctccccactggccgtccgtacgataagcctctctcttgaagtcggcccattcggacaaattcattctatcgggataagcagctacggaattgatggaataataaccgttatatgaaaccttggtcttgcctacagcccctttctttgtagtgatcaagataactccgttagcaccgcgagaaccataaatagcggtggaggaagcatccttcagaatttccatggattctatgacattgggattgatatcaatatctgtcccatagggcactccgtctacaataatcagcggagcattcgaagcgttcaatgaccgattaccgcgaatggaaaaggacaagcccgaacctgtctgaccacttgatttagtcatatccagtccagccactttcccttgcaggctttccaaagcattcgtcgtaggaacagcaataatgtccgcttgcttgatggaggtcatagaaccggtcaagtcccgtttctttacagtaccataaccaatgactaccacttcatccaattcttccgtatcttctttcaaaattacctttaccggagttcccggcttaatgacagcctcttgtgaaagcataccgatataactgatttccaattttttcgtgtccgcagggaccgacaaggagaaattcccctcgaaatcggtaatggttcctatagatgacttccccgccactttcacattagcaccgatgacaggctcaccggtactgtctagaactgtacctgttacggtaacattttgtgcataaacattcccgacactcatcaccaggaatgaaagcacaaacaaaataaacctactttgtttcatgttcttcattgttttcatttatagtatcatttaaagtttttagcactgcaaagatgaataaaaacaaaaaccggatattgcattattcagtctaagatttataaaatccggtttgagaataacaaaaacagagttatccgaatataaatcgatttaggctaacaggagggaatctgaaaatcccggcattctgtctttttgccattctaaacataatgaagaatccgaatacacacactattttgcgttaacagattcttcattacgttcaaaagaccaaagtaaaaagggtaatgcaatatagctttttgaagctttcttatttttcctattctatttcacttatagaaaaaagagtatttctacgctccatccgcacattttctccagttagctgacatgatgattccaaacggatatcagaagatgacgcacctattttaaatgtatattgaccaccggctatagtccatccattatttgcataataagccatttgctgaagagaaaccttaaaacttattattttcgattcgccggggttcaaattcacacgggcaaacccttttagctgtataggtttgagaaattccgaggaagtaggagacagataaagttgcacaacttcagtacctgcacattttcctgtatttttcaccttacaactaacctcaatcaaatcatcagttgtttgtgcagtagacggaacttttatatcactatattcaaaggaagtatatgaaagcccaaaaccaaacggataagctattctttcttggaattcaccattgttataacaataaagttctttatcttcagtcttaggatagctaacgcataattttccagacggattgacattgcctaacaaaatatcaacaacagcatttcctccttcttcgcccggataccacgcttgcagaatagctgaacaacctgcttctacttcgtcaatcacttgtggacgtccaccaaacataaccagaacaaccggtttacctgtagcaatcagttcttttaaaaactgttcctgatctcccggcaaacagatacctttacgttgccgagcctctccgcataaggtaggattctctcctaatgcagcaataatcacatcactttccgaagctacatttatggcagcctgccagttagtagaatcggatgattccattaacatcatattcaagcgttcagttctaggatctccttcacggataatggaagtctcattttttgcactccaatcacatccgcgttcatagtccacagtgaatctaccattcgccttgtgcttaaaagcatcatatacagaaacaattttaggactgtcagggtctatttttcctccccaccagaatgcctgcatagactgatatgtataatctcctaacatacaccaatatgtatttgcattcggccctaccaaagctattttcctatatttgccagagaggggcaatacattgttattttttaacaagacaatggattgacatgccaagtcataagaagttttacgatattcggggcaatccaaatccaaatttcctgttgcataaagcttccggtctgtagataataagcccagacgtgctttcaacattaatgcacgttttaccgcaatctcaaaatatttctcattaaccaaactgtctcctattaattcgggcagatatttataacaattatttgatggcaattcaatgtcattacctgcggttagagcctcaacagcccgttgtttcaagatatcaggatttcctttttgactagcatatcctactgccccatagtcactgaccactactccgtcaaatccaagatatccacgtaatattttattcagaagagtatcgctggatacggcttgttcactacggaaccggccataggatgtcatcaagaccttacatcccgcctgtcgtatcatagcttcgtgtggcaaaagcacttcctcataaatttctttccaactcaaagaagagcctccaccatatcccaaaaaatgcttggtgcacgcagcaactccatttttcaatcctttcttctgcagaccttccacaaaagcgactcccatagctgcactaagatacccatcttcaccataggattcttctatacgtggccaatgagcggtacgtatgagatcgaccatgggtgacaaagcaagagtagcgccaacagagcgcatgacttccgccgtttgttccgtttttactgtagccagttccggattccatgtgcaggctatacccaattgttggggataaacggtcgctcctttggcagccagtccggtaatggcctcttcgtgaaatatggctggtatacctgagggagtctcatgtatcagataattttgaagatcacgcacaaaatcacgcagttcatttggttccatatctaaagcgcaagcatattgacaaatatgccctataccgtcaggtatcttctctttacacttttctaatgacagttttccatcctccattatttctttcggacgaataccatacaattgtgcaactctttcggcttgtgtcatcctactataaagcgtatctacttgcaggctcatttcccgaatgtcgaaatcctcaattgttttttcatgggttttagaagtacaaccgataaatcctaaagatattagtataaaacagtaaattgatatttttttcatatttgaatttatatcagaaaatattcttgtaaaatcaaagacaacttgaaataaaagtataagtctgtcctgcttcagtagctacatcatataaataagaatctttcaattccactcctttcaatggaactttctcactaaccagcggacgactgatttcttgcttttcaaacaagggattaggattatctccttccgctttaaccaatgtcataccatccatcgccaaagtattgtgcacacgtaagcgaagattaccaccgatagtagatttgataattgccgactctaccttgccgtctttccatttcagagaaacgatttcgaaaccaccacgtgcacgaagccccctaatctctccatttttccaggtatcaggtaaagcaggaagtaaatgaacagccccatcatggctctgcatcaacatttcagcaattccggctgcacaaccaaaatttccatcaatctggaaaggcggatgagcatcgaataaatttggataagtacctcctccctgacctttctgtacttcaggagaaacaaaattcaactgattggcaatcaacttaaatgcatgattcccatccaaacatcttgcccaaaaacagactttccatcccatagaccaaccagtagaaggatcaccacgctgtatcaatgtattacgggcagcttcaaaaagtataggtgatgaataaggagaaatttgataaccggggaaaagtccccataaatgagagatatgacgatgatggtcattagggttatcccagtcttcgaaccactcttgcaactgtccgtattgccctacttgcatgggaggaagttgcctttttaatgacagaatggtatcacagaattgcttgtccagattcaaaatctgtgctgctgaacgagtatttgaaaataaatcggataccaactgattgtccatcgtgatacctgcaaacagattggctttccctttccaaatactaggcgaattctccggagagttactaggagtgactaccagataaccggtattgggatctcttactaaaaaatcaacaaaaaattctgaagcactcttcagaataggatacacggaagccaggtattccttatcacccgaatagaggtaacggtcccacaaatgttgacataaccacgcattacaggtaggccacggtccacaataagccctatctacagcaccattcatacgccacaaatccgtattgtgatgcaatacccatccccggcaaccatacatctcccgggcagcctcctgaccgttctcatacaattctttcaccatttgtaggaaaggctcatgcatctcacgcaaattggtaacttcggcaggccaataattcatttccgcattgatattggtggtataacggcatttccaagcaggatttagtttctgattccaaataccttgtaaattagcaggttgtcctcccggctgagaactggaaataagcaaataacgaccgaactgaaaataaagagcaaccagatggggatcatcggaaatagcgaattcttttatccggacatcagtaggtttatcagcctgcgaagtgcgtcccaaattcagagatacacggttatagtatttttgatatgcactgatatgagcctgtaaagctcgggcataattctttccggcattcttcatggataccttattacgcccggatggatttccggatatatccttataattcacaaaattagtggccatggcgatataaatagtagcactattagcattagtcacggataataatgtatctcctgccacactctttccaccctgtaaatctaacttcaaatctgcacggaaacaaatagaaccttttgtgaaatcgtctcctttagttgtgccttccaaaatcaaggcattctttccagaaacggtaacatccaccttctgaggacaagtcagggaagcggaaaaagtaagttttcccggttgagaagcagtaaggcggacaatgaccagctggtcgacaaaagaggtaaagacctcacgcttataatctattccatttacagtataagcagtcgtggctacagctttttccaaatccaattcacgacggaagtttgtataattttcatgactaggaaagtccagacgcaagctgcccactgtctgatatggcatcccgaaaccgttcttggagaggattttttcacctgccaacgcttgagcttcaggatatctaccagcaaaaattaactgacggatggtcgccaacgctcctttagcctcaggattataatttttataaggagaacctgccgatactgtttcctcattcaattgaatctcttcggttacaggattaccatataccatggctcccaatcgtccatttcccaaaggtaatgcctcttcccaatatctggcaggcttatcataccataatacaggtttttcctgagcatctatgctgatgctgactacagatagcaaaactacaagtgctatttttaataacttacgtgtcattttataattaaattaataaatatcatcgacttttataatggagaaagaaatccattctctatcaaccaagcttcagccaactccggccacatgaccgtgcttcccctttgtgcacgcaaagagatggcatgcccaccgacaggaaacagatgcaacgaagatttctctattcccgctttatacaaggctgtataataagcgatgctgttcaaaggagaaacagccttgtcattagaagcatgaaacaagatagccggtgccgtgttaccatccacttgtttttccaaagaaaacaagtttctgagagcgatatcctgttcccgctttcccaacagatttgtccggctccctttatgaacaatagcgtcatccatagaaataaccggagatatcaatacagcaaaagaaggtttacaactatatgcatccagtgcatcgcccacttttgaccagtcttcatcaatagcacacaatgaagtggccagatgaccgccggcagaacaacccatcactcccactttatgaatatctattccatattcctccgcatgagcacgtatatagcgaagagcacgttgtccatcctgcaaaggagctttgtaagattctattacatccggtgattgcgggaaacgatgtatcaggacaaaagccgttactcccaaggtattataccattttgccaatgcgataccgctgatttcatgcgccagtttcacatatccgccaccaggaatgatcaataccgccgtaccggtacgctcggcttttgacggttcataaacatgaacagcaggaattccgacttgtaccacacgttccctgactacagaatctttaagaactatacctttgctattgggcatattattctgccacaaaggaattattttctgagcctgaagagtaaccgtcatcaatgccatcaaaagaaaacctaataaaaatacgaatctgttcattactttatactcctttaaaatcctgtccatttactgttacattctcaaagtgaatgttttcaacaccagtcaccttatttatttccggtttcatcactccatcaaaagtgcaatctttcacaaaaatatctcgcgcctgtattttatcctcaaaaccatccagatgcaaaacatactgacttttcttacttgtgatattttccaaatgaatattgtgaaaataaggaagatacggtccgtcatccacatgccaatatttcaattcaaagcctaaaatagactccttacattcacctaccttaatattccggataaatatattttctacttcgcctcctcgcatggcatttgattttatacggataatacggtcgagttcaggactgtccatggtacaattttccacccatacgttacggcatcctccggtcacttcactgccaatagctactccggcatgaccatccttcattctacaatgacggactataatattctcactggggatattccagtaacggccatcttcatcacgtcccgatttgatggcgatacaatcatcacctgtatcaaaatcacaatcctcaatcaatacattcctgcatgattccggatcacaaccatcattattatagccatgactctgcattttgactttcctgacagtgatattctcggacaacaacggatgaataagccagaacggagaacggttgagagtaaatccttccaatagaatattcttacatttatagaggttgataaactggggacgtataccattctctctcataaagacacgttctttaaaaggaatagaatcctctttcatttcatacaacaaagttttctcatttattttcttaccatcttcctgtacaataccacgaattctgttttcactgaaccaattactgctatcagcctggccatccatcaccccgttaccagtgatggcaatattagtttctccataggcataaatcaacggagagatattgtaacaatctattccttctatgcgagtctgcacaaggtcgaagaagaagggatctgtagtaaacttcagtaccgtactgtcagataaatgaaggtttacattggatttcaaacggatgggggctgtgagaaactctccatcgggaataataactttcccacctccctgctcagaacaaatagttatggccctattaatggcattcgtataaagcgtgtcttttacgtcgtgataatccgtaatcacgaaacttctctcagggaagacaggaggtacaatttgattattaacctcggtcatttgattccacggagatacttcttttttatcacatgaagatatggctgttgtcagaaacagcaaagataccaaaatttgagcggttcttgtctgcatagtattgtattatgtttataattctatgcaaaaataggacaagatacctatacagccattgcagtatttggggcattaattatacattttgttcaacaatcgttttatgctttaatctgtactcttttggtgtacatcccattgcttctttgaatactctgctgaaatattgcggagtagtgaatccactcatatatcctacttcagatacagtaaattcatcttgttccaaaagttggacagcccgtttaatccgcatcgtctttacaaaatctacaggagaaactcccatcaaagatttcaccttccggtagaatacagtccggctcatgctcatagcttctgccaaatcgtcaattttaaattcagaattctgaatgttttcctccacactctgaagaatattccggatgaaatcattatcaaaatgagtaacttgaggagtagaaggagtaagttgttccataagactagtatctttctcgccttctctcatctttgaaatgtaataatcatacaatatttgccgttgtttgagtaaggaatctactctggctttcaaataagcagaactaaaaggtttcgttatatattcatctgccccgtattccagtccttggatttggtcattcaaagaagacttggcagataacaaaataataggaatatgacaaatatcattgtttcctttaacccgtttcagatattctattccatccatttcgggcatcataatatcactgatcacgatatcgggtaattctctcaacgtcatttcaagtccttgacaaccattacccgcttcaagaaccacatactccctagcaagcacaccacagataaaatggcgaagttcttcattatcctcaataatgagaatccgtgtttccttatcttcttcctcttctgtaagcttatcgggtattgccacctcctgtccggaattcttgctgtccgctagaataaattcaatattggcatcggcatcgaaaacatcacggttacccggcagtctgataaagaaactgctaccttcacccagtttgctgtctactctgacagtaccatgaagcagattcagtaattctttgaccaatgaaagtcctataccggtagacatattgggatcaatctcatccaaagtatcaaaacgggtaaacagacgattgagcttttgggcattaatacctctaccctcatctttcacctgcaaacacaaaatctgtttctcgcaagtaacagatagggagatacttttctcatcaggagtatatttaaaggcattggacaataaattaaaaagaatcttctccaatttgtccacatccgtatacataacaaaggaatcgagaggacaaaacaacctgaaatcaatacgatgcgtatgagccataggaacaaaattaccgtagatttttagaattaaagggattatatctacttgttccaccaatactttcatcttgtcattctgtatcttgcgaaaatccaatatttgattgatgagccgcaacattctgtctgtgtttcttttggccacttgcatattctccatgcctgcatcagataatttctcattactaatgacttcgtcaatgggactggctataagcgtcaacggtgtacgaagctcatgggatatatcagtaaagaaacgcagttttaagttggaaatctgttgttcaaaatctatccttctttgcaggttagtaatgcgtaacacaatgcagatcactaccaacataatcaccacggccatggtgatatagagcaataccgcccaaacagtttcaccgaacacaggatcaatatgtatggacaaagatgccacattatcaacccataccccatcggcattagtggatttgacttgaaacagataatcgccggcaggtacattcaccaaactggcagaacgattatttccaagctctatccattggtcattcagtcccttaattcgatatacgtattttatagccggagagttaacatagtccaaggcagcaaaagttatagtgaaattacgttcatccggctgcaggtactgagcctcatcgttactatatatgtcctgcctgcgagaagtattattctgataaatgtcaagatgggaaaaaacgataggaggaacgaaatcactcttatgcaactcatcgggaattatacataacgcaccatatagtgaccctaaaagcaatttaccagaagatagcaaaacaggcctagtctctgccatctgtatctgatctttatactcttcgagcagattcaggccagcatcaaatttggaaatcttgttttctgaaactatccatatatttccttcttgatcctctatgctggacagtgacaaatccggtaatcggtcattagtggcattgtaatgtttaaagttcaatctttcagataaactgctaccatcatccaaaatattaataccaccactcaaagtagttaccagcagtttaccacccttagtttgggttatatccaatatatcattattgctcaaactggaataacgctcatcacaaacattatgaaaaaaacgaatctcttccggacgggaaaaatctgtagaacaggacagcaatccgccagtagtacctatcaaaatcactccatcagccacctcatataaacaacgcactttctcacatacatgaatggggtaattattgagaatattaccgtaatgaacaaacttcaaatctcctcctgcggaagcagactcaaccaaattgatacctccaccgaaagtgccaatccatattcttccagacgaatcttgcaaaatagagaatatagacttggaagaaatgctgtaaggattatctttatcaggcaggtaacaagttacctgatagttgtcctccccttgaaaacggaataaaaacaaaccgtcttctctagtccccatccagatgttatgatccttatcttcgtaaatacagtacacgtcagcattaaatgagacagactgatccgccactatttttcctttttgcgaaatatttcctatccactgtcctaacgaatcataaagacagatgtttcccggttgagttttatgattccgtttccaaccaatccatacacgtttgcgatgatcttccatcaacgaacgagcagactctttatgtctgttgattatataatccaacccactttgatgaaaagaaagatatcctaattcacttcctggagtggtataccacagatttttatgatgatcaataaaatagctgaaagcctgaaatgagattggtactctcactcctttttcataaacataagcctgttccaaagatctagtcatcggatcataaaagtataactcaccttctacaggattcacccaaatacaaccatactcgtcctcatgtataaaagtacagggcttggtaaaaggaacttcctttaacttaggataacttaataagataatatcctcagtagtacaatctaaacgaataaccccgcccgtgacccccagcaaccaaaaaataccttttctatcttgatatatatcaggactgatctctacaggcattttataaagagtaaacttgcctgttttcggattataaaaccgaatctcttttctctgtaaaatagcgattttatgatcagataaagatttcagtccgataatctcagacataggttcattggggacacatggaacaacattttgactctgatagtcatatcgggcaaaaaagccttttgaagtagcaagatagatatcatctgcattctctaccataaacttaaaaggcataagatttgccatactcttctttcctacaatcgtagctcctttatttgtcagaatccattcatctccatccttgtcctgcatcacaatatagatactgtctcctatgttattttctatttttccagtatataattgcactgactccgtagcaggaaatctattttcatccaaacggaataactcattttgtacacctacggcccatgttatccctttacgcaatacatacagtttttcaactgagtttatcacccctttgttgaaaagaaagggatcttcatactgacaagtacgggtattaaacagataacaatgtttatcatacgtctgacaccaaatattattcagagaacttttttcaatattggtaaaacgatgatttgttatacgtacatcactttcaggataagttttataattagtaaaagaatatccatcaaaacgctctagtccgttccacgtagccatccatatataaccattatcatcttgaatgaaattctgaatatttttctgtgataacccatcctgaactgaataatatttaatatcaatcaaactctgaccaaacaaaggcaaggcagaaaaatacaaccatataagaagaatctgtttcgacatagtatttacctttttcaaccacacaaatatcggaaaaagatgtcacaaaccaatagcctgaatagttattacaatgattagacctgtttttataagaaattctaccataagtagcaatatcacaccataacctcccctttcaaaagaactctgccgaagtatagcttcggcagagaaaagaacaagatgaacgtctatccagacattcacaatgctaaaccataaactgatctttaaaaattaacaattcattattctgtccagtcctccactatagccgaaggatccggattcaatataatagcttggttattaatagattcaaacttactaaaaaataaattgaaccatggacagcaatatccttctttagagttcatacgataccccaccggacaattggtacctagatacccccgtgtaacaggcaattctaaacgcttataatcccaataaataataccctctccccaaaattctatccttttttgcaaaatcaattccttacgaaaatcctccatagtagatgccgtacattgataggaactgtaacgataagttttcataaaattctctaaagcagaaattccagcacttaccccctgactagcggctattgcctcagcctcaataaaatacatttcttcaacacgcattaaaagattatctatcggtgcacctacattggcgtcaatcatattgccttctttcggcttgaattttaaatgaacatatgcaggcacctttttaaaattctcatcggtgaacaatgtatgatatttagtacctggagcctttccagcatcttcaggagcaatccaagtttctttgcgccaatcatcatccgagatttgctcaaataaaaccttactgatcattctgtgtgccccataggaaattcctcctaccccaaatgtctgttctgtacacaagtgccctgccaaattaagccatacactgtgaatattctctttattcatgattcctccccacatccatgcacttgtctgaatagagttaaaggccgtaaaatagtcttttccaccataccattccaattctgtcaatggagcagcaccacttttaactatagcctgtcttgcacaatcggcagctttaatataacaatccttatccgaatctatatctaaatccacattctggatcagtgctgccaaatcattaggatacttttcaaatcgcgtacccaattctagccaaaaacgagcttttaatgcaaatataatggacaaatcaggcatattcttagtaggcctcaagtaatcagctaatagaacttctgcattctccaaatcatccaagatatatctgtaaatagtataaaaaggaacccgcggattattacgtgcttctgcttccgttatattctcaccaatgatagggactgttaatccatataccccattggtagcagcctcgtcatccagcttagaaaatccagtcttcttaaactcaaacagacgagccatatccatgtaaatcatcgcacgaaaggctttggctattcctacatattgcctatttgtctctgtagtattatcaagatccacaatacggattaaattattgacattattcaaaaatttatagtagtaataataaatagaattcacctctgaattatcagccaagctacggcacaatccgaaagaattataataatcataaccagatttatatatataaaaatcctcacacataacttctcttataataccgtatgaggtatagcccaagtcccaagtataaccttgtccataagtattatatgcattaacaaagcctaccacggcatttaacatagcattcatagcagctggtgattctgcaatctgctcggaaatagcggtagagcttttgggaaaggtctgttcgatacaactgctcatatttatacctgtaccgaaaagcagacaggcaactaccgctgtttgaaataatatatttttctttttcatcgtcttaaaatttttgattataactaagttagaattgaagactgatacctccggaataagtacggaacggagctatctttcctgatgtacctactcctgaaatggaacggcgaggatccaagccttttctttttgaccaatagtatacattatcgcaaacaaaatataaacgtaaatttttaattttcaaatgagaagtccaactatcaggtaatgtataccccacttgaatattttgtagattcaaatagcttccatcaatcagaaagcggtctgacgaaccagtcgtattcagatcattgaaatgccaacgtggaatggttgatgagggattttctggagaccatgcctttagcacatctttatgccaacggttacctacagatgttgcagttgggttacccatcatacctgcataaccgtaatcataagtcaaaccaccaaccaaataggaaaattgagtagagagatcaaaaccatggaaagtaatggaagtgccaaaaccaccatacaaatccggattaggatctccacacaaataaaagtcgcctgtagaataagtggtcgttgttttttcctcattggtttctttatccgtataataccacagtgaaagtccgtcctcagacaaaccggcaaaacgtttcatataccatgtattgataggcagatcctcaccataatatctgcttccattcatatatcctccatgaccatccataacagtagtctttttctcatctggcaaataagtaatcttattcttatagtgtgtcagattcagatttattttccatgtaaaattctttttattaacaggaatatagttcagttccagttcaacacccttattcgccatatcgccgatattatcatagtacccaggataacccaaagaaagaggaacattgaaccaatttaacatatcagtagtcttacgataaaacaattcaacaccaccattcagttttcctttaagcagttcaaactcaactcccaaattcatgttagtattcgtttcccaagttatatcttttttccccttactattaaaagacaatgaaagttcatcattactattcactatattatagctgtctgtataattatatgaacctatattatcattaccttgctgtcctatggagaactttattttgagcatatcaatccatttcacatcaaaccagtcctctttagacattagataagcaccgcctacagaataaaaattaccccaccaatgatcaggatgaaaacgcgaagaagcatcacgacgataagaagccgaaaaataatattttgcatcgtaatcatataaagcacggaaaaaatatccctccgtattataatcattcgaataagaagcagcacttgaaccatctataacagccccattcaattcatggtttccccaatatgaaaacatatttttcttggatgcggataattctgcataattatatttataactctcatgtcccaacattaccgaaatattatgtttaccaaaattatggctataattcaatatctgctgtaagtttaatgtagtagtacgataatgatacattgtcactgtgccattctgttctgcaccaaaaccataatatggatttgttgtagtataatatctgatttcattaactgtggttcccacattaaatgtaaacttaaaatctttcaaaaaagtaatatctacaaatgcattaccattaaatgtattaccattcctattttcttggttaagcatagatgactgaatagaagaattaggatggttaggacgtgccaatcccagttgtgccgtcgctgttccataatcatatactttcccatttaaatccgtcagaatatttccatcagcattcctcacatatacaggatagattggtgccatgccctctgtaaagctggataaatccgtatcatacttttctgtcaaggaagcactattactatgtgtataactgatgttagcaccatatttcatccatttttttgcttggtacaagcctttaaaacgagcggaatatcgttcataatttgaactaggaacaattccatcatcttttaaataaccaaaagaaccatatgattgcatcttatcggttcctccagcaatattcacattatattcttgacgcaaggcagaactataagcttcatcaacccaatcatccggataaagcatatatccattaaccaccctgcccaaagttgcattgggattcagctttccgttcataccaataagattttcgttttcaggataactatacacattataagtcaaaccaccattttccttcgtattacccaccatatttttattagcttgagcataagcctctccttctgaaagcccctttacatacctcaattgattatataatgccttataatgtacttcataatattcacccggatctttgatatagtcataatcaattgtaccacgagtattcactccccattttgcactagccgtaacaacagcttcaccagcttttgcctgcttggtagtaataataataacaccattggcaccacgtgcaccatataacgcatttgatgctgcatcttttaaaacggacactgattcaacatcagatgggttgatattgttccatcctccctcatagggcataccatctacaataataagtggatcattatccgcattgatagaaccaataccacgaattatcaatgttggagcatctcctcccggctgcccagatccacttgtcatttgtaagcctgccacttgtccagcaagtgcctgaacgacgttcgttgtctgtcttttagaaagtttctcagcatttacaactgaagccgatccagtaaatgccgaccttttggctgtaccataagcaacaaccatcacttcatccatcatttcagactctgtaaccaatactaccttgacaaaagatttaacatcaaccacttgggtcttcataccaataaatgaaaccattactttcttatcagttggtttaatattatccaacacaaatttaccatccacatctgttatcgtaccatgtgtagttccctgtatcaacacagaagctcctactaccggcaatccatcatccttggaaagaacaattcccgacattttggttacttgagccgataaatggcctattacaactaataagcacattaaaaacagaacaatgcgttttcccataccatttagattttttttaataggtccttaattccgcaacactattacaaatataactttttaagtacctgagcaacaaaaagttgctcaggaatttgccatgtcagatttttcacctatcttagtgttgcaaatcaaaatatgtatcaaacccgacagacatggcaaaggtagcaattaaatccgagaaactcactccttttggaggaatattttcaataatggagcaatttgactccagactctcatctgtaatcgactcaaccctcggtatgagatgcaggctgtatggttatcaatacagcgaaatcatccgttcgcttatgagcgtttatttttgtggcggctcatgcatcgaggatgtcaccactcatctgatgtaccacctttcgcttcatccgacacttcgcacatgcagtgccgacacgattcttagagccataaaggaactgacccaggataacatttcctacacatccgacactggcaagacctacgacttcaacacggcagacaagctgaatacactgctcctcaattgcctattgtccacagggcagctgaaagagggcgaggggtatgacgttgacttcgaccaccagttcatagaggctgagaagtttgatgcgaagcctacatacaagaagttccttggttatcgccctggcgtggcggttattggcaacttgattgtcggcattgagaacagcgacggcaacacaaatgtccgtttccaccagaaggacacgctgaagaggttctttgaaaggtttgaacaaaacaagcttattatcaaccgtttcagagctgattgcggctcgtgttctgaagagatagtggaagagattgctaaacactgcaagaccttctatatccgtgctaaccgatgcagttcgctctacaatgacatctttgccctcagaggttggaagaaagtggaattgggcggcattgagtttgagctggcctccattctcatcgagaaatggaaagggaaggcataccgtcttgtgattcaaagacagaagcggatagacggcgaactcgacctgtgggaaggagaatacacctaccgctgcatccttacaaatgactacgagtcttccgagaaagagattgtcgaattctataacctccgtggagggaaggaacgcatcttcgatgatatgaataacggattcggctggaacaggcttccaaaatcctttatgggagaaaacacggtgtttcttctgcttatggcactcatacgcaacttctataaattcatcatggcgaggcttgacgtgaagaggttcggactcaaagcaacaagccgcatcaagacgtttgtctttaagttcatctctgtgccagccaaatgggtcaggacatcaaggaagtatgtgctgaatatctattcatgcaacaatgcttatgccaatgtgttccagaatgactttggataacaccgacaacttatagtcgtgattttgcgtattgcctcaagtcgcatggtggggtaaggggcatttatatgtctttatggtgacattcgatgcactgtgccccctttttactaacgatgcagattcttttcgcttctgtatcatattaggcgcgtagttgcggatttgaggtaggtttaatatgatggaaacaaatatattaaatacaatcgatgaataaaaactttattcacttttttttctttatattttttaaaacgataagtgttttgtgcaaaaattagggtcagcggattttccgggttggcaagctttcttttaagcgtatagcctagccagtctgaacatgaagaacttcagatcagccacccctcttaactggcttcgaaaagctttgattttagcattgaacgactccgctgaagcatttgtcaatcgttcttcaaaataatttatgatggtcgtactatggtttgaaaaggtatcaagtaccttgttgaactccatatagtcaaacttttccacttcattgtaccatcttgcgagatttagccttgcttcatcgggacctgacttcttgttgaagatgtctgtcagtttcatgctaaggctgtatccttccagaagcttggggaatttatcaaagagaatggcagccctggtcttttgctgttcattccatttgctccagtgtttcagtataatatgcttgcttctgcttactatctgtggcagggtttctccgttctccattctttcaggctcccatttccctattctctccctttccgccttactctttgcttctttcttcttttgacggtgctccctgatagcctgattttccgcatcaagtactttccaccgatagcgtattcttaactggtctacagcttcagacatgagctgctgtacatgaaaacggtcattgatcagctttgcggcaggaaacacctttctgaccgtcagcatcatggctgaagataaatctgtagtgacagtcttgacagacagccgtttccggtgcggaagcctgcgcaagattccgcttaccgcatctgtggccactccacgaaccattgcaactaaagcccccttacggcctttagctgctttattggtcagaatcgtataaacatctccattgctcaggcaagtttcatccaaagaaaggttttctccaatgttttcaggataaaggaggtagtcatgcgcatgttcgagttggtcccagttccggtaatcactgattttctccttgtattgtttacgaagagtctgcccttttacgccataacgttccgcaagcacacagatactcacaggagtagattcaatctccttcttttaaaaaagacctgaattcaaacagacaatgcaacagtgtcgaattcattgttagttaataatttatatttttcctttggggtcatgtaacccaatctttttctcggtcttgagtttaagatgttttgaacgcgcattacctgttcattggttatgtccctaaagtccgtacccttcgggaagtattgcctaatcaaaccattgctgttttcattggctcctctttcccacgagtggtatggttttgcaaagtaaacaaaaatatttagtttacgtgcaatttcttcgtgaaaactaaattcttttccattatctgccgttattgtatgtatttggtctctaaaaggttccaaggcatcgatggcagctttagttagcgggctggcatctttcccgctaagtagtcttatccatactagtccagttaccctgtcgtttatagttaatagtgctcctttgtgattcattccaatgactgtgtcaatttccaaatcaccaaaacgtactttcttgtctactatcgtaggacgcttgtctatgtccacgcggtttttgataaaaccacgtccattagtcaatgcacctctcttcttatgacttcttccccgtcttcttaaatgcttgtataacaacttatctccatgctttttatcttcccaaatatactggtagattgtctcatgagaaactgtttccaagccctttgttcgcataaacccagtcacttgttctggactgaaatctttctttatgagtatatctacttgaattttcaagtcgtccgtaaacttcacgaagtgctttcgtgaacgcattctggacatatacttagcctgagcgagatccggtttgtaaatgccattacgtttatcactattacgacgtaattcacgacttatagtgctacgatgaactcctacaagattggcaatctcggttcttgactttccgctttgcagataagcggaaatgttatacctttgttcttcggttagctgtttcatattgcaactgaatgttggggaactggaagatgcaaagaaacaacttttccacaggggaacaaaagggaaagaaatcttctttctctgttcctctgaaaaattattcttttcgtatcttctcattgtcatcattctcactcctgttgcattatccgcttgaacttaggagaaacgaactcagaattcagccgtgtaccgtcaaattcggataaatcccagtcatagctgaagatttcattggaagacttgtcaagccatttacgtttacgaacatggagataagtggcgcgaccacgaataggatagtcttggattgtacggtactcaccaaaaccataggatatgatatccgggttggtcttatcttcttttagctgaacttttttttcatcaagataaatatcaaaacggtcagcactcttgtcgaaattgacaatatcaaagttgtctataagcacatccggaaggatggcacgaaggagtcgttcgggtttcataaaacaaaggtaagcaaaggtagctaattttaaaacttaacaaccagaaatttccgctgagccaaaaattacataataaaagaaaatatcaagcctaaattatttaataaaagaagtatcacttttttaacttcaagaataattctagtatgtagaaatcgaagtttccaaactgaaccgagatgtgggaagcgttgtagaattttcaaactgagccgcaaatatggtgcaatttactaaaataaaaatcacaaatatctaataactagatatttgtgattttatttcgtactcgaagcgggacttgaacccgcacagccgcaatggccaagggattttaagtccctcgtgtctaccgattccaccattcgagcatcctcgacgagagagagcggaaaacgaggctcgaactcgcgaccctaaccttggcaaggttatgctctaccaactgagctatttccgccttttgttttaacggatgcaaagataagtcattttataataccaaccaaactttgcacccatttttttatttacaatcgtaaaattccctctatttcggccaattcttcattagtaaagttcaaattatccaatgcatgaagattatctgccaactgtttcacagaacttgtccccacaataacagaagtcattcgttcgtctttcaagacccatgccaatgccatctcagccaaagtctggccacgacgagcggctatttcatccaaccgacgtgcttttcctactttatcttctgtcacttgatctactttcaaaaatccggtagaacgggccgcacgagaatgttccggaataccatgcagatattttttagtcagcaagccttgcgccaaaggcgaaaatgcaataaaaccggagccttgttctgcagccaatggcaatgatttctcctctacagtacggtcaaacatactataacgatattgactaatgagacacggtacaccggcagccctcaacatttcataagctattttagcttgtgctggagggtattttgaaatacccacatacaatgcctttccttgcttcactatatcaatcaatgcctgcattgtttcctcaacaggagtcaccccatcataacggtgactatagaatatatcaaagtaatccaaaccggtacgacgcaaactttgatcaatgctggccattaaattcttacgcgaactgtttcctccataaggtccatcccacatttcatgccctgcttttgaggaaataatcaattcatcacgataaccttgaaaattttcctttaagattttaccaaaattaatctcagcacttcccggaatggggccataattattagccaagtcaaaatgcgtaaccccattatcgaaagcgtatttaatcatatcggttgccacaccgaaatcgtccacactgccaaaattatgccacaagcctaaagagatacgaggcaaaagtaatccgctattcccacagtatttatactgcatcttgtcatagcgctctgctgaaggttgatatttcatgatcatgcgatttataattgtttctatctacccaaaagggattgttctgcctgctccatgactgagaagttaaaaccatctactacctgttgcatcagattttcaattctgtcattacacaaattacctatactaccctcatgagtatgatgtaccttcttgttgtgagtaaattttccggcttctatatccaagcccaccttcttataagcatcacggaatggcatgccctcagaagccagacggttaacctcttccacactaaatatataaaggtaacgatcatcatccagaatatgctcgttgattttaatcttgtccataatataggcagccatttgcaaacactccttcagctcctgaaaagcaggcaggaatacttcttttataatctgcaaatcacggaagtaacccgaaggcagattgttcattatcatcataatttgttgggggagaacctgtatcttgttacacttagcccgtgtcagttcgaacacatcgggattcttcttatggggcataatactggaaccagttgtacactcgtccggaagtttcacgaagccaaaattctgactactaaacatacaagcatcaaaagccatcttagaaacggttccggcaatagaagccaaggcaaaagctacattacgttccattttgccacgtcccatctgcgcatataccacattatagttcatcgaatcaaaacccagcagactagtagtcatctcacggtttagcgggaaagaagaaccataaccggcagcagaccccaacggattacggttgcacattttgaatgcggcctgcagaaacatcatatcgtccaccaaactctctgcatacgcaccaaaccacaagccaaatgaagaaggcatcgctatctgcaaatgggtatatcccggcatcagcacatctttatattgattgctttgagaaatcagcacatggaaaagccgctctactgcttcggccacttcttttaattccgcacgagtaaacagcttcaaatccaccagcacctggtcattgcgtgaacgtccactatgaattttcttcccgacatctcccaacttacgcgtcaacatcaattctacttgcgagtgtacatcctctataccatcctctattacaaactctcccttttcggcagaagcatagatattctttaattccgctaacaacatttccaattctccggccgtaagcaaaccaatactttccaacatggtgatatgtgccattgagcccaatacatcgtgtttagccagataaaggtccatttcacggtcacgtcctactgtaaaacgatctatctcctcatttactcggacatttttttcccaaagtttctgtgccatatttttctttattttttaataaggaatcatcgataacatctcagccagtttatccaccccatcctgtaaaggtttagtaaccattgccttcataaacatattcacttctgcacgaatagttactttcagttttgcctgcccagcctctacaggcaaaatctgaatccacaaattcatagggaccggagatttttcactttcgaatttaacacatttacaaggttcacgttctataatacgcaaagtaatgcttatgccttgtaccgtaaaacttaaagaatcacagtcgaactccataccttgtaccttgtcagccaatttatcacgtacagattccaagttacttaaatccgacaacttattaaacacctgctcctgactataaggaacatatttcacactactctcaaattgtgccataatacctgctctctaaaaacacgaaaagaacaatccggaaatccataaaaatttccgaacggttctcttcatattatatttgttttaaaactataacttatttgcctgcctcccaatgagccggatcctttctccagttatctaaaacagaaacatcctcttcattaatatatccggttttcaaggccgaatccaatacagcttcataattagtcagagtaaccaagttcacttttgcttccttgaacgcttcaattgccaccgggaaaccataagtaaatgcagcgaccataccaatcacttcacatccgtcacgacggatagcttcaacagctttcaagctactgccgccagttgaaatcaagtcctcaataactacgactttcataccaggacgaagttcaccttcaatcaggttttccaagccatggtctttcggagtagaacgaacatacacaaacggcagattcaattcttcagccaccaaagctccttgagggatagcccctgtcgccacaccggcaatagcatctacctgaccgaacttctccaggacaatacggctaatctcaagtttcacaaaattacgaagagaaggatacgaaagagttttgcggttatcacaataaaaaggcgacttccaaccggatgcccaagtaaaaggattagccggctgcaacttgatagccttaatcttcagtaatttctctgcgaataatttttctaaagtcttcataactcaactatatctgataaatattgtgcaaaaatatagaaatacatcgagataatgaaaaatcggacaaggtatttttctaaaaaatagttgttgttatcaagattcccctaccaatgccaaagtaagtacactgatacgtaatccgggtatgccacgaaaggcatcagcgcaagaaacaaccgtagcccctgttgtcagcacatcatccaccaacaatagatgctttccttccaagccatcggggaaaatacaggcaaacaaatttcgcacgttttcccatcttgcatattgtcctttatgcgtctgcgtatcagtatatctgcttcttatcacaactttagtgttcataggaatacctgtcaccaccgaaactccccgtaccaagcattcactctgattatacccccttaaacgttttttacgttgatgtaacgggacaggaacaatcaaatctatcccatcaaaaaaatgagaacacataagttcagatgccatcatccgccccatcacttcacccacttcttgattaccatgatatttcagttcatacaacaactgtcggacattccctccctttgcataataaagaaaagaggtggcacgctccaccggtatttttccccagaagttacattctacaatattatctttccgtaaatgaaattgagtacgcggaagccttgacaagcatttcaagcaaagcactctctcccctgatataagctgccgcccacaaagcagacaactatgtgggaaaaataaattccaaagatcagtccaaatagacatcatcttctccggtttgtttcacacaacggcaaacagcctctatttcaaatcctctaccaacagcaaaacgaatcaatttcccattccgttcgtattccgtacatgctttcactctacttcttttctgctcgatcaagccagacagaatctccacatactcccgttcatctatctcctccaacccttcggctataacatccgcagggatcttcttcatgcgcaaagcctgactgattttcactctgccccattggttaaagcgatatttatcacgaacaaaagccgagcaaaaacgcttctggtcaatgtatctctcatcctgcaaatgccgaacgattttctccatcacttccggagttgccccccattgtgataatttagcctctacatccgttacacaacgttccattgaagaacaataagcttctgccttatacctcaactcattctcacttaattctcctttcatctcatttttccgcttttatcattctatcattttgaaagagatctttcctcaattctatatttttgtatcccaaaccagctagcatatccaccgtctcccggccatattcctgattaatttcaaaataaagccttccaccagacactaacatatccctacccaattctgctattttccgataaaacagcaatggactatcatccggcacaaacaaagccaattccggctcccactccaagacattagcactcatattcgctttctccttttctgtaatataaggtggattgctgacaatgacatcaaactgctcaccggcaggagaagcaagcagcacatccctttgctcaagagttacacgaacgccgttccgcctgcaattacgttctgcaacttgcaacgccttttctgagacatcccatgaaacgacctccgcctcttccagattcttggtcaaagagacagcgatacaaccactccccgtaccaatatccaatattttaacccaaccatacttatgttcccgtataatccaatctaccaactcccccgtttccggacgtggaatcaatacatgtttattcacttcaaaagtaagaccataaaactcttcagtgcctattatatattgaataggttctagtttttgcagacggaccagaatatcatccaaccgtttctgctcattcactgaaaaagtagtatctttgcctgcatacaattcaacaacagacataccgaagacttgtgtaagcagcaatttagccataggtacaagttctgtatcggggtaatacccctgcaaggtttgttttatgtaagatacaacaggattcatagtgtcattttatatgcaaaagtaagaatttaaacaagactgttatgacaaaagatgaaaaatatatttcccgttgtctgcaactggcacacaacggactctgtaacacagctcctaatccgatggtaggtgctgtcatcgtatatcacgataccattattggagagggctaccacatccgttgcggagaggcacatgccgaagtaaacgccatacgttccgttaaagacgaaaatctgttgaaggaatcaaccatttacgtaagtctggaaccatgctcccattatgggaagacccctccctgcgccgatctgattatagagaagaaaatccccaaagtcgtgataggctgcatggacccgttttctctggtagccggcagaggtatcgaaaaactgcgcaaagccggtattgaagtaactgtaggtgtattagaggaggaatgccggcacctgataagacgcttcattacattcaacacactcaaacgcccatacataaccttaaagtgggcagaatctaccgatggtttcatcgatataaaccgcacaggaggaaaaccgatcaaactatccaatccactgaccagcatgctggtacacaaaaaacgcgccgaacatgacgctatattagtaggacgacgcacggcattacttgacaatccctccttatccacccggaattggtacggcaagcatcccgtacgcctggtaatagacaaagaattgacattaccgcgagacctggaacttttcagtggcaggataaagacattcgtgttcacccgaaaatccccccatcagccaaacacattaacagaatacatatctttggattttagcaaagacatcctgccgcaaataatggaagtattatatcagaaaaaaatacaatcacttctagtagaaggaggaagtattttattacagtctttcatagattccagtctatgggatgaagccttcatagaaaaggttccactgtgtttgaagaatgggatagaggcaccttctattcaaaaaaaatactttaaattgaataaaatatactttggaagagaaataatgcatgccgtccatccacaaaaccaaagacaaaatgtggctgattgacagagaaaaagggctagtttatctataaattaatataaaacttgccctaaaacttctgtatagaaaaaaatcttcctacttttgcgacttgtaacaatagactcatttgcaaatgaaaataaagtttttgactgtcatcacaagtctgcttactgcagcttttatgattacatcttgcttggacgacaacgaagtagaaacagaatatagttcagaatcaagcattaccgcttttgctataaaagataaaattgaaactcaatataccgaaaaggttaatggcaaagatacaacgctgacattcaccgttgatggtaccaaatacccttttgccatcgaccaaggcacaagacatatctacaatgtagactccctgccagtcggtacagacatcagcaaagttgtagtcagcataacatcagatggtatcggagtttttattgttgcagaggacaaagattcgttgtggaatgaaaccgactccttgaatttcgaaaaacctatccaatttaaagttatggcaatgagcggagtctatgggcctatttataaagctgagattaatgtacataaacaagttcccgactcattgcagtggagccatagaggaagtagtttcgacaacaccatccaggcacaaaaagcagtcacattaggagattatatttatgttttcgcacagcaagacaatggtgccgctgttacaagcacccacatcaatgatggaggaacctggacacccttacaggctttacctgaaaatatgctaaatgcggactattcttctgccatggcatggggagacaaattatacatacttgccgacaatgacctgtactgttcctctgatggaaaaagctggagcaagattggcactaacaccaaattcgagaagctgattgccggcgttcattcagaatataaccgcaaattgtacgccatagacaccaacaatcattttatggaaagtacggatgctatggcgtgggatactaatggagaggttccggccaatttcccgaaaaatcagatatcatacacagcttacccgttggtaaccaataaatccatagaccgtatggtactaatgggggaaaatcccattgcgaccgacacgacctctactgtatggaccagactgaccacagaagacagttgggcagattatcctacagccgcatacgatagtttttattgtcccaagctggctaatatagccatgattcattacaacgaccaattatacgctttcggtggtccgggcaaaagtttcggtaaggacattcccgccttcagccaattctatgaatcaacagatcaaggcgttacatggaaacctgtttctagatatgtatttttcccaacagaattccccgatctataccatcaggcagacggcaactattcttatgttatagacaaaaataactttttgtggattatatggagccgaagtggagaagtatggaggggaagaatcaataagttgggattcgattccaaggaataaagtcaaagagagtcatataaaatagattgcgacatgccatatagagagcaaatagacaaaagccgtatacctgcccatgtagccattataatggatggaaatggaagatgggctaaacaacgtggacaggcacgtagcttcggacatcaagccggtgcagaaactgtacacatcatagcagaagaagcggctagactgggagtcaaatacttgacactatatactttctctaccgaaaactggaatcgcccggtagatgaagtcgctgctctgatgagtcttctgatggactccattgaagaagaaactttcatgaaaaacaacatcagttttcgcattatcggtgatacggcaaagttaccggtagaagttctggaacgattgaaccaatgtattgaacacacctcaatcaataccggcatgtgtctgacacttgctttaagctactcttccaaatgggaaataacagaagcggtaagacaaataacgatcaagattcaaaacaacaaactagccattgacgacatcgatgacaatttgataagtgcgcatttaagtacaaactatatgcccgatccagatttgcttatacgtaccggaggagaaatccgccttagcaactatctgctttggcaatgtgcttattccgaactatatttttgtgaaacgttctggccggatttccgcgaagaagaattttgcaaagccatttatgattatcagaaaagagaacgccgtttcggcaaaaccagtgaacaaatataaagttagataaaatgctatatcgtatttcacttatactattaacgcttacatgcctattttgcttttcaacaggcagttacgcccaagaagcaaacgtagaagaaaacgacaatccagtcatactttattccggaacgcccaagaagtatgaaatcggcggaatcaaagtagaaggcgtaaaaaactatgaagattatgtattgatcggactttcaggactatcggtaggacagaccattgttgttccgggagatgacattaccacagctgtaaaacgttattggcgacacggactgttctctgatgtacaaatcatagctgaaaaaattgttggagacaagatctatttaaaaatcatcctggctcaacgtccacgtattgccgacattcgttaccacggcgtaaagaaaagcgagcgtgaagatttggaagccaaactaggtttggtaaaaggaagccagattactcccaacttgatagaccgtgctaaaatattaatcaagaaacatttcgatgaaaaaggttttaaaaacgccgaagtgactattgtagagcgtgatttggctgacaataaagaccaagtggatgttgatgtaatgattgacaagaaagaaaaggtaaaagtccacaagatcaccattgacggcaacactgtgttgagtgacaagaagttaaagcgtgtcatgaagaagacgaatgagaaaaacaaacttgtcaacctcttccgtaccaaaaagttcattgaagagaaatacgaagaagacaaacagcatatcatcgacaaatacaacgaattaggttaccgcgacgcacaaattgttgtggacagcatttctccatacgatgaccgtaccgtcgatgtgtatatgaaaatagaagaaggtgacaaatactatctgcgcaacgtgacatgggtaggtaacaccatttatgcttcggactggctgaacgagcaactccgtatgaaaaaaggagatgtttataaccagaaattaatgaccgagcgtctaaccggtgatgaagacgctatcggtaactactactataataaaggatacgtattctacaaccttgacccggtagaagtaaacatagacggtgactccattgacttggaaatgcgtattcaggaaggtcctcaggcctctatcagcaaagtgcgcatcaacggtaacgaccgtttgtatgaaaacgtggtacgccgtgagttaagaaccaaaccgggagatctgttcagcaaagaagcattggaacgttcctatcgtgagatagcccaaatgggacatttcaaccctgaaaatatccagccggatgttcaaccggatcctaccaatggtacagtagacatcaactggaatctggagtctaaagcaaatgaccaggtagagttctcggcaggttggggacagaccggtgttatcggtaaattaagtttgaagttcacgaacttctctatggcaaacttgttccataagagtgataactaccgaggattcctgccacaaggtgatgggcagacattgaccatcagcggacagaccaacggtagttactaccagtcatatagtgtatcgttctttgacccgtggtttggcgggaaacgtccgaattcattctctgtttcggctttctactccatacagacagatatcagcagtaactactataactcagcttatatgaataattactataattattacagcggttatggtaattattatggtggatataacaactacgagtcttattatgaccccgacaaatctatccagatgtatggagcatccatcggttggggtaagcgtttgaggtggccggatgactactttaccctgtcagccgaactctcttaccaacgatttatattgaaagactggagctacctgtatatcaagttgaacaacggagagtatatgtcaactggtaattgcaacaacttgagtttgaatctaactctggcacgtaactctacggacaacccgattttcccgcgtcgcggttctgaattctcggcttccgtacagttgactcctccatactcattgttcagtaacaaggactactcggtatacggtaaagatgattatgatgaagcggcaagcatgttcaactggattgaataccataaatggaaattcaaatcaaagacctataccgcccttacaggaggtcagaaatgtccggttattatgacacgcgcagaattcggcttgctgggtcactataacaaatacaaaaaatcaccttttgaaacattctacatgggtggtgacggtatgacaggctatagcaccagctacgcttccgaaaccattgcactgcgtggttacgaaaacggttcattgaccccttatggtagtgaaggctacgcttacgtacgtttaggtgcagaattaagatacccgttgatgctggagaattcgaccagtatctatgcgctaggcttcatcgaaggaggtaacgcatggacagatgtaagcaagttcaatccgttccagttgaaacgctcggcaggtgtcggtgtccgtatcttcctgccgatgattggtatgatgggtattgactgggcatatggtttcgacaagattaacggctccagccgttatagtggaagccagttccactttatcctaggacaagagttttaataactaaaaacaaagtgattatgaaaaaggctatcctattatctctattgtttgtggcttgtgtattcacagccagcgctcaaaagtttgccttgattgatatggaatatatcctgaagaatattcctgcatacgaacaggcgaatacccaactgaatcaagcttcacaacaatatcaaagtgaggtggaggcgaaagcaaaagaagcggaaacactttataaagaataccagaaagcctcggcttccctgtcggccgcacagaaaacgcaaagagaagaagcaattgtggcaaaagaaaaggaagcagccgaactgagaaagaaatatttcggtcctgaaggagaaatggccaaaaaacaagaagcattaatcgcacctattcaagataaaatctatgaagcggtaaaacagatttcagagcaaaaaggatatgcggcagtagtagacagaggctctgcccaaagtattattttcgcgtctccaagcattgatatcagcaatgaagtgctctcaagattaggatattcaaattaatttcctacatttgcaaccgataatccaaatttgcaataactaataaaaaatagaactatgttgaaaaaaattgctttactacttttactcatcgttccgatgagtgtatttgctcagaaattcgggcatcttaaatctgcagatgtacttactgtcatgccggaatttacaaaggctcagactgacatccaagctatgcagaaacaatatgaggatgaaatgaaacgtgcgactgatgaactgaccaaaaaatatactgaataccaacaggaacaagccaaccttcctaagaacattcaggaaagacgccagaaagaattgcaggaattacaggaaaaaggaatgcagttccaacaagacgcacaacagcaattgcagaaatcatacgctgatatgatggaacctatctacaaaaaaattgaggatgccatcaaagcagtaggccaggaaggtggatatacttatatctttgatttgaacagaacagaaattccctacgtaaatgaagcgcagtccacagatgtaactgctgctgtcaaagctaaagtaggaatcaaataattaagttaaagacctttacaggcacggattacacagatttcataggtttcgaaaccgtgaacatccgtgtaatccgtgcctgtattatatagctatactgccatgatcccatctctccccccttcaaccggccctatcggtgtattcgactccggctacggtggtctaaccattctggacaaaatacgcggactgatgcctgaatatgattatatctatttgggagacagcgcacgctgtccatacggaccgcgctcctttgaagttgtttacgaatttaccttgcaagccgtaagcaaactgttcgaactaggatgccctttggtgatattggcatgcaacacagcatcggcaaaagccttacgcaccatccagcagatcaatcttccggtaatagacgctacccgcagagtactcggggtcatccggcctacagcagaatgtataggagaaatcacccgaagccggcacgtaggcatactggccacagccggtaccatcaaatccgaatcctatcttttggaaatacataaattatctcccgacattgtggtaacaggagaagcctgtcccatgtgggtttccttagtagagaataatgaatatcaatcggaaggagccgactatttcgtcaaacaacatatcaaccggctgctggataaagacccgatgattgacaccatcatactgggatgtacccattatccgttactgcttgataaaataagacagtttactcccggacatatccgcatcatcgcacaaggagaatatgtagcccgaagtctgcaggactatttgaatcgccatcctgaaatggacgcacgttgcgaaaaaggaggaaaatgccgcttccttaccaccgaaagtgaaaacaagttcgaggaatccgcttccatcttcttaggtcggcaggacataaaagtagaaagcatagcattggaataactttcttccggtttacctgttatatataccatccataacgcttaattcatgaagatatgtatacaaataaagtaaagaagatagctgcggtacacgatttatccggtgcaggacgagtatctctcaccgtcgttatccctatcctctcatccatgggctttcaagtctgccctctgcccacagccgtattatccagccacacccaatacccgcacttctccttcttggacctcacggacgagatgcccaagattatcaacgaatggaagcaactgaagatacagtttgacgctatctatacaggctatttgggctctccccagcaaatacaaatcgtatcccggtttattgatgatttccgacaacctgacagtctggttatgatagatcctgttttgggagataacgggaaattatatgccaacttcgatgaacaaatgattatggagatgcgccatctcatccggaaagccgatgttatcacacctaatatgaccgaactcttttatctgcttgacaaaccttataaagcagagaatacggacgcggaactgaaaaactatctgcacgaaatatcagaacacggtcccggtatcgtcattatcaccagcgtacccgtacaagatgactcgcacaagacttccgtatatgcatacgacaggcaaggagaccgttattggaaagttacttgcccctacctgcctgctcattaccccggcacaggtgatacatttaccagtgtgataaccggctcactgatgcagggagacagcctgcctatcgccttggaccgcgccacacagttcatcctgcaaggcatccgcgccactttcggatatgaatatgataaccgagaaggaattctgctagagaaggtattgcacaatctggatatgccaatccagatcagcagttatgaactgatttgaggatcccgaaagtagaagatttgtcccccggggaaggaagcttgtaccaagccctattactccgacgattaaggtcgtttttccttatagctaacccttatcatacagttaactactacagactccggcagtggactgtacagtctactgcaagagtttatacagtccactatatcagactgtacaaaccaccggaagagactatagtacacaaccataaaaaagagcttaaccataaaacaaaatagggttaaccacaaagaagaaaagacttaaccagataaagccataaggccaaaagacgaaaagagtaaaaccaaagaaagcagccaaatcgtaccgtgcaaaccaacaaacatcagccgtatcaacaataataaataaattacctgcccagcagcctgcggctgagataacgcacgggataccacacagaaagaaagcccaccaccagcacagtgacaaaaactataacaatatcccatgcatggacactgaccggataggcatccaccacaaaattgccaccggagttaccacctcccagcgaaagcaatccgaattcctgctggataaaacaaaggatcaagcccagtgccactccgataaccgcacccatcaatgaaatcatacgcccctcgaacagaaagatacgcgtaatcaacttgtcgctggcccctaaattgcgcaatgtcactacatctgccttcttatctataatcagcatggacaatgagcctatcacattaaagcaggctatcatcaggataaaggtaaggaaaatataagagatcagcttctctatctccataatgcggaaagtatccgcttgctgctcataccggtcctgcacccggaaatcatctcccaatattttctgtatcttcgattttacactccctgcatctacatccggcttcaatttcaattctaccgaactcacttctgtgtcatactgaaacaacctacgggcaaattggagggaagtcaaaatgtaagaagagtcatacttctgttggttcaccgcaaaaacaaggccgctggaatataaatcggcagagttaaagctggaagcaggattggccatattgactttaactccccgtttgggagcataaatctctagcggatcgaggaatttgatacccgttcccaagatagaaaccaattctatgccgggaatggcataatctaccacttcatcatgcaacacgaattgcccccggccgaaaaggatactgtcaatagcggtcagatcctcgaaattatcttcaattcctttaatcaccgccatggtctgacgatctttatactgaaccatcgcattctcttccaaagactcagaaaaaacagcgatctccggcatccggcgcaaagcttctatacgcgcttcttgtccgtcaaaaacctttccggtgacagccgtaattttcagctccgggtcaaaagccgtaaagaaagtagctaccagatcctggaagccgttaaaaacagacaaagtgcataccaatgccaatgtagccaaagccactccgcagacggaaatggctgaaataacattaatggcattgtgcgacttcttggaaaaaagataacgcttcgctatataaaagggaaaattcaccgtccggttctactttttcaacagttcgtctatacgttcggcataatccaatgaatcatccacaaagaatttcaactcgggaatgatgcgcaactgatggcgtacccgtgttcctaattcataacggatggatttcatattatcattgatattctttactatttcctggctcctctcagaagggaacacgctgagatagacgcgtgcaatactcatatcgggactgatgcggacagcacttaccgacaccaaaacaccattcatggacttggtctgaagcaggaaaatctcactcaactccttttggatcaaacgagaaatcttattttgtctggtcgtttccataattaataattattcagtttgctaatttgctaatatgccatacggttcatagcgcaagctatgagcacattattcaacattttcttatgattgtcagcccgtcgcgcaagggaagaatcaccttttcaacccgtttgtcggcagctaccaaatcattaaatttcgttattccaatagtctgaagatctgtatgatgcggttcctccaatacatgtccgtcccacaatgtgttgtcggcaatgatatatccgccgggtgataatttctccagtaccatttcgtaatattcaatatacttccgcttatcaccgtctacaaacgctaaatcaaaggtaatgttcataccaggcagcaacttcagcgcatcacctatataaaatttaatcttgccggcgtaagacgaaccttccagccagggacgtgtaaagtcctcctgctcatcgtttatctcaaatgtgtgcaacatggccccctcttccaacccttcggccaggcaaagtgcggagtagccactgtaagtcccgatttccaacacctgacgggggcgtatcatttgcacaaacattttcaacatacgtccctgcaagtggccggaagccatacggggacgtaaaagcttgacgtgcgtatcgcgataaagtgccttcaggtaatcactttcttcgtcaatgtgctgaaggatatattcgtcaatagcgtccgtttctttcattcctatcttctatttttataggtaacggttgcggttgggcagcacatagtccatagcatacttcaacacatctcccactacattgatttcaaggaaagaagtctgagtaccttgcttaccgctgctcagataggccaccatgtcgctttcactcaaaacgccatcatccagcaatttacgcaaagcagcgaaataatatgcctgtccgttagccttttcgggcatatagatagcctccaccccatatgacaaagccagatgacgcatcgttttttctttataacagatggccaatacaggatatttgccacggaaagcagcaatattacgtgcggtacgcccgctgaaactgtcggtaataatggcgcggatattcagtttgctggtagcctttactgcctgttttgccaggaaagcagttacgtcattggagttttcatccaaaggaatacggatgtcattctcggccagtttatctttctcagcctgcgctgcaatcttggccatcgtcttcacggcttccaccggatacttgccgtatgccgtttctccactcagcatcaatgcatccgtgcggtagtaaatagcattggcaatatcggtcacttcagcacgggtaggacgcggattattaatcatggtatgcaacatctgggtagcaacaatcaccggtttctttgccagaatacatttctttatcaacaaacgctgaatgccggggattcgttcctgaggaacttcaatgcccaagtcaccacgagccaccatgactccgtcggccacttccaatatttcatcaatattgtccactccttcctgattctcgatcttggcgataatcttaatgtcgctgccgtatgcatccagtatctggcggatatccagcacatcttgcttattacgaacaaacgaatgtgctatgaaatcaatgtccttttcaatagcatacagtatattgttacggtccttttctgtcaaagaagggagattgatgcgcacgcccggtacattcacactcttacggttacccaaagtagcttcattctgcacctcgcacaacaaatactcgtctgtcttctcaatcacgcgcagctccagatcaccatcatcaatcagaatatcgccatccacctgaagatcatgcacaaaaccgggataagatacagcaatacattcacgggtcgtttcttgtgctggattgcctacaatctttactttgtcaccaatctgataaggaataggctcaccgcctgcaatagcagtagtacgcacttcgggaccttttgtgtccatcaatatggcaatacggttggaaacctcacgtacattggttatcaatttttcaaaaccttcacgtgaagcgtgagccgtattcatacggaccacattcataccagccttgaaaagatctcttataaactctacctcgcaacgctgatctgagatggacgctacgatttttgtttgtttcaacatcataatcttatcaccttatattatacctaaactttttattttctcatcaacaaagcctcaatcgccaaacgatatgaatgaagcccgaacccacaaattactcccacacaagcgcaagaaatcatcgacttatggcgaaactcctcacgggtatgtacatttgagatgtgcacctcaatcacaggagctgtcacggcgcggatagcatcctgtaaagcaatggaagtatgcgtataagcccctgcattcaagacgatgccgtcataatcaaaacccacttcgtgtattttattgatcatctcaccttccacattcgactgataatacgctatttcaatgtccggataagtacggcgcaattccaccagatagtcttcaaatgaaacagcaccataaatggaaggttcccgtttgcctaataaattgatattaggtccattaataatttgtattttcatatttatactatatctgaactttttctacctttgcagggaatttgggtacaaaggtagaaaaaagaaatgaaaagaaccgagaaaacagacaagatattggtgaaatacaggcaatatttaaagttggagaaatcgttatctgacaatacggtagatgcttatcttactgacctggacaagttactggcttatcttacattagaaaatatcaacattctggatgtccggcttgaaaatctggaagatttctcagccggattacatgatatcggcatccacccccgttcgcaggcacgcatcttgtcaggcatccgctctttctaccgtttcctcattatggaagattatctggaatccgacccaacagaattactggaatccccccagacaggtttcaaactacccgaagtaatgacggtggaagaaatagacttattgataggcagcatagaccgcggaaccaaagaaggtcaacgcaacagagccatattggaaacactttacagttgcggactacgtgtttccgaactctgtaatctgaaattatccgaactttattttgaagaaggcttcatcaaggtggaagggaaaggaagcaaacagcggctggtccctatttcaccgcgtgccatcaaggaaatcaggctctacttcaccgaccgtaacctgatgaaaataaagccgggatttgaagattttgtcttcatcagcaatttcgggaagaacatctcccgcatcatggttttccatatcatcaaggaactggcagagcgcatcggtttgaaaaaaaaaatcagtcctcataccttccgccattcttttgcgacacacttgctggaaggaggcgccaacttgcgtgccatacagtgtatgcttggacacgaaagtatcgggaccacagaaatttatacacacatagaccgcaatatgttacgcagtgaaatcatagaacaccacccccgtaacatcaaattcagagaaaaaggtaaataaaggttctatattctaaaatattttaagataaattgaaaaaaagcaggctaagaagctagcacataatagagtttttcctatctttgtccccaaagagacgcacaaaaacgtactatagcgaattttacattacaaacgttaaattaataaagtaactatgattaaaaagttgtatttgcccttagtggctttattggtccttgccctgtcatcatgcggcaagatgggagaattgtcttctgactatttcacaactaaccctgaagtgcttgaagcaatcggtggtaaagtgcctgtgacaattaatggtaaattccccgagaagtatttcaagaagaacgcaactgttgaagttacccctgttctgagatggaaaggtggcgaagctaaaggccagcctgctgtattccaaggagaaaaagtagaaggaaacaatcagactatcgcttacaaagcaggtggtagctatacgatgaaagcttctttcgactatgttcccgaaatggcaaactctgaactttatcttgatttcaagattacaaaaggaaagaaatcatacactattccttctgtgaaaatcgctgatggcgttatcgcgacttctgaactgcctactgctgccagctctaacgcatcatacgctaacgatgctttccaacgcattattaaagatgctcaaactgctaacatcatgttcttgatccagcaagctaacttgcgcaacagcgaattgaattctgacgatatcaaagaattccataagaaagtggctgaagttaatgctgacaccaagaactacaaactgaataacattgaaatttctgcatacgcttcacctgatggtggtgtgaaactgaacaccggtttggctgaaaaccgtgaagcaaacacagaaaaatatatggaacgccagttgaagaaaggcaagattgatactaacctggatgcaaaatacactgcacaagattgggaaggtttccaagaactggtatccaaatcaaacttgcaggataaagatttgatcttgcgtgttctttctatgtacaatgatcctgaacaaagagaagctgaaatcaagaatatttcttctgtatacaaaactttggctgacgaaatcctgcctcagttacgtcgtgcccgtttaactgccaactatgacatcatcggtcgtagcgatgatgaaatcaacgaagcattcaactctgatcctaaagtattgagtgtagaagaattattgtacgctgctacactgactaacgacaacgcccgcaaagaagctatcttcaacaagacaactcaactttatccgaacgatttccgtgcttataacaacctgggtgaattggcattcgctgccggtgatgctgctaaagcagaaaactacttcaaacaagctgcttctaagaacgctagcgctcctgaagtaaacgctaaccttggtctttgcgaattggttaagggcaatgttgcagctgctgaaacttacttaggcaaagctacaggtgctaatgctgccggtgaagctttgggtaacttgtatatcaaacaaggccagtatgacagagctgtcaactcattcggtgacgctaagactaacagtgccgctcaagctcagattttggctaaagactataacaaagcaaaagcgaccttgtctgcaatcaagaatccggatgcaatgactgactacttgatggctatcgttggtgctcgcacaaacaatgcttcattggtaagcagcagcatcaagagcgcaatcgcaaaagatccttcaatggctgaaaaagctgctaacgatcgcgagttcgctaaatacgccgacgctatcaaataatataactagatatcatcttgtctagtttttagatgattattactgtaaccggaggcttcgtgatgaagcttccggcttttttatgtaaaataaccttcatttatacctgcctttagccacaaaatgcgtattttcgcaaaaaatatcttgaaatgaaaaaattactattctttcttttcactcttgttgtgctggcaagcggctgcggcaagaaaaatacattcaccttagaaggaagcattaaaggactcccttcagacactatattagtattttatcaagagcccgattacaagctagataccatactcctctcaaaaggcaaattcacttacactattacccctgacacatttactatcttttcattactattaggagaaaaacaaatcttgccgatatatgctgataaaggagaaagtgtcaccctaaacggaatggtcggagagatagaggttaaaggaaagggagaaaacgcacaactggcaaaacatatccagtaccttaacacattagaaaataacaaaactgccgttatggctgctgtggattcattaattaaaaccaatccacactcgtatagcaatatctatctgatagacaaatattatgtacaggactcgcttcctgactataaccacatagatcaactgataaaaggattaagcggtatcataaaagacacaccttatattatagatctccagaataaattaagtgagaaaaaagaactgacagatcatcgctacgtttccaacatctcgtgcacggacagagaaggaaagaccatcaactggaacagcgtaaaagggaaatatgtccttttggatttttgggcaagctggaacaaagaaagcattgccacacaagattctttagtacccgtacaaaaggcattgaaaaaaaataagtttgttattatcagcctctcccttgacttggacaaaaaggaatggatggagaaaatcattcaaagagacaccacacaatggaaacaagtttgcgatttcaaaggctgggacaattccattgtcaaacagcaaggcataacccggattcctgccaatatacttataggtcctgacaagcgggtcatcacgcaagatatacgaggcaaagaactgatagacaaagtgaaacagctgatagaacaagataaagagaaagaaaaagccgccaaagaggcagaacgtactcgaaagagacaaaataaaaaataaaagaatgctggtaaaagtctatggagcagccgttcaaggtatcgacgctaccattgtaactattgaagtaaatagttcacgaggtataaaattcttccttgtcggtctgccggactcggccgtgaaagaaagtcatgaacgtattatttccgctttacaggtaaacggatataaattccctacttgtcagattgtagtgaatatggcccctgctgacatacgtaaagaggggtctgcatacgatcttccgctagcaatcggaatattggccgctacccaaatcgtatcggaagaaaaactttcacgctatcttattatcggagaacttagcctagatggaagcctgcaacccgtcaaaggagctctctccatagctatcagtgcccgagaacaaggttttgaaggattcatacttcccaaacaaaatgcgcgagaagctgctgtagtaaacaatctgaaagtatatggcgtagaaaatatcaaagaggttatcgaatttttcaataatgaacgcaatctggagcctagcatcgtcaatacacgggaagaattctatgaaaaccaaagtagctttccatacgattttgctgatgtaaaaggacaagaaagtgtaaaacgcgcattggaagtagccgcgtctggaggacacaacttgattatgatcggttcacccggaagtggaaagtccatgatggcaaagtgtatgccaagcattctccctcccctgtcattgggtgaaagtctggaaacgactaaaatacattcaatagcaggaaaattaggaaaagacagctcactgattgctattcggcctttccgtagtccccatcatacaatctcgcaagtagcaatggtaggtggcggcaccaatccccaaccgggagaaatcagtctggcccacaacggtttgctctttctagacgagttgccggaatttaatagaagtgtacttgaagtacttcgccaacccctagaggacaggtatatatccatctcacgagctaaatacagtctagattatccggccagtttcatgctggtagccagtatgaatccctgtccatgcggatattataatcatcccacacgagcttgcgtctgtaatcctggacaagtgcaacggtacctgaaccgtatctccggtcctttactggaccgcatagatatccaaatagaaatagttccggttccattcgagaaaatggcagaacaacatcatgcagaaagtagtgcaagcatacgcaaacgggttatcaaggcccggaaaatacaagctcaacgttttgctaaccatccgggtatttactgcaacgcacaaatggaagccggattactccatctgtatgctcaacccaatgaagcagggctaaaattattacaaactgccatgacacgcctcaacctgtcggcacgcgcatatggtcgtattctaaaagtagcacgtaccattgccgatctggacaacagcgaacacattacttccatccacctggcagaagcgataagctatagaaatcttgatagagaagactgggccggctagtttagctgccgggctcagtttcctttgcatgataaatgacctgcatcaatgaatccagttcaatgtaatttgcaagtatatcctcttcttcatcggtcatttcccaatctttattctcactctttttagagaaaagtacattcaaaatgaatttataccacgcattcatgattctttcaatctaaggttttcatcaaaaacagaataagaaaagtttagttcattaatcttccctatttttctcttttttcgatagctttatcgaacctttaggagagaactcaaattttcctacataccaatgtccaccctcttccaacttcttttgattcatatctttgattaaaacagaatctgatttaaatgcaccaccattttcttcgccgtctatatcattaaaatagactttctgttcattaattccacctatactcaagtcttcggtcttgaattctcctttttcatctgtataaattgtatcggcagggaaaacgccattattccaatcttgccttacgattacctgaatgtttttcaaaggctcatccttatccgaagtcactgtacctttcactaagaatttgctataaggagtaccatattcacatcgtatctccaaattctcatcttcattactgcaagaagcgaatccaagtaaaaccaacgctccggacaataaccgatgtactgtcattttctttttcatgttcataatccctaatagtttaaagtcagtttttatgttatttatcttctttagaaagttttatttccatgttgtattcataagtacctaaataccagtttccgtctcctttctttatttgtttactttccatatccttcatacagacagaatccgatttaaaagttcctccatttgcctcaccatctatatcattaaatatcaatttcttcgtatcgacccatccgtctctcatcatctgtgaaacaaactcacctccagaatctgtataaatagtatcattcatccggaccaactccccttcttcatcattataatatgcattctcattttttacaattacctgaatgtctttcaaagcctttccgtcatcagatatcaccttacctcttacccggaaatccatagtaggagttccatattccactgaggtttcagcacaagcagcaaaacccaataaagccagcataccgcataagctctgctccaatactttcttctgtttcatcttcttcattcctttcttttttatggtgtttgcaatctttttaaatgacagaacaataaatctccattttcatcgcgcaggtgcatgccattccctttacagaaacgaaaatatttacaatcagcacattcatcttttttcatccattctcggtcacggtaaggtttgaatctatgattccatacttccataaaatcattctcataaatatttccctggtgataatcggcacgaatactgggacaagcagaaatcgctccatcaataagaactgagccgaccgatattcccgcccggcaagcgaagaaagtatcgcgcacttcagcctcataattacctaaaaatccctcacaaccgtaacttacatggatccgtccttccttacggctcttcctgataaattccattactcctctgaactcctcattagacaattgaagttcaggatctttggctgcacgccctaccgggaatatagtaaaaagccgccaaccttttacccccaaacttatcaagaagtctttcaactcctccaaacgcatataactatgcttatttacacaagtaaccacatcaaaaacaaaatcaggaacctgtaccatcaacttgatcgcttcaacagcccgttcaaaactttgcgggttgccccgcatccagttatgatccgtcgcaaaaccgtcaagactgaccgtagccgtatgcaatccggcatccaacagcccattcaatcgttcacgagtcatatatagtccattagttaccattccccaaggaaaccctctttcataaatagcacgcccacactcttccagatccttcctcatcaagggttccccaccagcaataatcacaaagattttatgcggatcattttgagctgagacactatccaacacccgaagaaaatcttccttcggcatatcaggatgaccagcgatctttttacaatcactgccacaatgtcgacaatgcaaattacaacgaagagtacattcccaaaatagttgcttcaactgatgctcttccgtacgctcattttccaaccgccggaatatttcaagacccatccgacgacgaatagacaaaggggcatttatattcatgtgtttttccttttttatattaaatgcaaagaagtgcaaatcactgcatcacaatataacattttttgcaatttcccagcttccggcaaagcccccgaataacaatatcttataataagtatggtctgtcagaaattttaaatgagaaatatttctgattattccatatacttactaaaaatcactaactttgcacgttactggtagaaataacaaaaaaagacatcatacaatggaaaataaattcaaaagaaccaccgtcacatccgctttgccttacgcaaacggtccggtacatattggtcatctggcaggtgtatatgttcctgctgatatctacgtgcgctatctccgcctgaagaaagaagatgttcttttcatcggaggctctgacgaacacggagtacctatcaccattcgtgcaaaaaaagaaggtattactccgcaagatgtggtggaccgctatcataccttgataaaagaatcattcaaagaatttggaatttcattcgatatatactctcgtactacatcaaaaacacaccacgaactagcttccgaattcttcaaaaccctgtatgataaaagtgagttcattgaaaagacctccatgcaatattatgacgaagaagcccatcagttcctggccgaccgttatattatcggtgaatgtcctcactgccatgcagaaggagcctacggtgaccaatgcgagaagtgcggaacatctctttctccaaccgacctgatcaatccgaaaagtgctatcagtggcagccaacctgtgatgcgtgaaactaaacactggtatctgccattggacaaacacgaaggatggctgcgtgaatggattcttgagaatcataaagaatggcgccctaatgtatacggacaatgtaaaagctggttggatataggcttgcaacctcgtgcggtaagccgtgacttggattggggaatccctgttcctgtagaaggtgctgaaggaaaagtactttacgtatggtttgatgcccccatcggctatatttcaaatacaaaagaattacttcccgacagttgggaaacttggtggaaagatccagaaacccgtttgattcacttcatcggaaaagacaatattgtattccactgcattgttttccctgctatgctgaaagcagaaggaagctatatcttaccggataacgtacctagcaatgaattcctgaacctggaaggtgacaagatttccacttcacgcaactgggcagtatggttgcatgaatatttgcaggacttccccggcaaacaggatgtattgcgctatgtattgacagccaatgcccccgagacaaaagacaacgattttacctggaaagattttcaagcacgtaacaacaatgagttggtagctgtttatggtaactttgtaaaccgtgctttagtgctgactcataaatatttcgatgggaaagttccagtttgcggtgaattgaccgattacgataaagaaacattaaaagaatttgcagacgtaaaggcagaagtagaaaaactattggatgtattcaaattccgcgatgcacaaaaagaggcaatgaacctggcacgtatcggtaataaatacttagctgatacagaaccctggaaactggcaaagactgatatggaccgtgtagccaccattcttaacatagcattgcaactagttgccaatctggcaattgctttcgaacccttcctgcctttcagcagcgaaaagctccgccaaatgctgaatatggaaacatttgaatgggaccaactgggacgtaccgatctgctggcagaagggcatcaattgaataaagcagaactgttgttcgaaaagatcgaagatgaaaccattcaagcacaagtagacaaactgttggctaccaaaaaagcaaacgaggctgccagctataaagctaacccgataaaaccgataattgctttcgaagaatttgaaaagttagatatccgtgtaggtaccgtattagaatgtgaagtagtgcctaaaatgaaaaaactgctgaaattcaagattgctgacggactggagaaccgtaccatcgtcagcggtatcgcgcaacattataaaccggaagaactgataggcaaacaagttttattcattgccaactttgctccgcgccaattcaagaatggactggtgagcgaaggcatgattctaagtgctgaaaactttgacggcaccttagcagtgacctcattattaagggaggtaaagccgggcagtgaagtaaaataatatacacccaaatacagaaaaggctgaaagcaactgaaacgtccgctttcagcctgactattttataatctatctataaaaatggcagaacaatccttgaaagaaaaaacagcaaaaggcctcttctggggtggactaagcaacggagtacagcagctgctgaatctttttttcgggatattcctatcacgcattctgaatgccgaagattatggcatggtgggaatgctatccatcttctctcttattgcaggttccttacaggaaagtgggttcacggcagccctagctaacaaacgggagatctcccacaaagactataatgccgtattctggttcagtaccggactaagtgcctgtctctacctcattttgttcctttgcgccccactcattgccgaattctatcatactcccgaactgacagctttggcacgatacactttcctcggtttctttgtagccagtttgggtattgcccacagtgcttacctgttccgcaacttaatggtcaagcaaaaggcaatggcggtcactatcggattaactgcctcaggaactatcggtataactatggcctgcttgggatttgcctattggggcatagccacacaaagcattgtttatgtaggaactattaatatctgttattggtgcttctcaccctggcgacctacacttactttcgatttcaagcctttaaaagggatgctttctttcagcagcaaattagtagtaaccaatatattcaaccacatcaataataatatctttaccgttattcttggtaaattctattcgggacaagaagtaggctattttactcaagctaataaatggaattatatgggacattcattaatttcaggaacagtcaacagtgtggcccaacctgtactttccagtttatcggatgaaagggaacgccaacaacgcgctttccggaagatgctccgcttcactgcctttatttctttcccggctatgttaggattatcattaatcgcacccgaactgattatgctgactattacggacaaatggttgcccagtgcctccatcctacagttgctctgcatcggtggcgcattcatccccataaccaatttgtattccaacctagttatcagcaaaggaaaatcggatatctacatgtggaataccatcagtttaggcattatccagttaacaaccatgctcctgctttatccatacggtgtacataccatgattatagtgtatgtatccatcaatatctgctggctgtttgtatggcactattttgtatggcaacaaatacggctcaacttgttcgcagcactgaaagacatccttccgtttgccttcatagctactgcggtaatggcagctacctattatgtcactatcggctttgccaatctgtatttattaatggcaagcaagattatcatagccggcacactctacacagccatcctgtggttgagcggctctgtcacttttaaagagagtttacactatataatcaagaaataatggctgctacacgtcactccggattagaatgtttacgaattatcagtatcatactgattgtatccatgcatattctagggaataccttccacaccagtaatttgctgaacaaagaattcatactatttgtcaatacattgggaaacacaggagtaactttattcattctgatctcaggctatttcggaatccgtttcaatacacataaatttttcaagatgctggttgtcgtatggttttattccatcgtttcttatctgatcgaaacaatatggcttcacactccgcatacctggacaggactagcctcctcattgataccgatacttagcaaaaaatactggtttatgacctgctatgtagtgctttattgtttctcaccctatttaaaccgactggttcaaaacctctcacaaaaaagttatgaacaactactgttactatggggattcttttttatatttgccccgacaatcctgttttttgaaattcaaaatgacacaggtaagggaattatcaatgtcacactagcttatctcataggacaatatctaaaggtctatggtcttccggaaaacatgaaacgacatagctgggatattttatcagggagccttgccggtatttttatactgaattccctgcttacagcaatgagtggaaatatcatactgagattcgcccgagataataatctactgattatcatcgcctctatcatggttttctaccagttcacccgatggcatttttcatcccgcatcatcaattacctagcaggatacgtttttgccttatatatgcttcaaggacttcttatccactgtttacaaccctggtataccccttatgcagacagcaatctacttgttctgtattttatgggaacacttgtttctatctgtctgacaacacttgttatagaatggagcagacggctgctattaggaaaaatagaaaacaaattagcagatgcaatggaaagaagaggagcaaaaattaaaatgtttacagataatcattaaaacaattatttatttccgcaactcataatttcaaaatctccaatggagtccctcctatctgagctgccatatccgaaaatgaactctgaaaagaaccatatattttttgtgtacgggccaatgtgtacatatccgtgataccctcccttattccctccaaagatccacggtctgccttttttccggaacagaatatccggtcaccataacgctctttcatctcccgcttcacctcttccgaatctgtagccaaatagatagccaccttatcgtcctcttttatctcctcatccagtttctgatagaataactcgatagggctttgccggatagaagccagattatctgtacgacggatatgcataccaatcatggtatccgaaaaattccgacaacggttttccacctcttccataacctcttctaccggaacaaataaccgactgatccatacataatcataaggttgaaaagcggtatatgatgccatataaacacagctaccttctttaacccaccgttcaaaatcaaaatgccgattacataaaggagtaatagaacgctcgtacaggcaagacttgaaaaacagtttctgaaacaaaagcgggaaatgaaaattcctggaacgaggtctgtccaacaatgcataatccaactgcgaagcatcccgcaaacaggcaatcttcctgtccataggtttgaacaattggctaaacggtgcatttagcgcccaatcctgaaaccaaacgatacttaaatcactatcactcttcgctgccagtgtcacggccgaagccaccgcacgcatacggttagccagtcctcctaccggtacaaatgtaattttacccattctcattaaattttaaggcaaatataaacaacattgcttataaatgctaattaattactacttttgcatagtcccccgataaacaaaagaaatgagaaaaaatatcgcaatcgtattagcaggaggtataggcagccgcttaggtctgtccactcccaagcaattctttaaagtagcgggcaaaatggtagtcgagcatacaatagatgctttcgaaagcaatccgcacatcgatgaaattgccattgtttccaatcctttttatattgctgactttgagtccatcattatcaagaatggatggaaaaaagtgaagaagattttgaaaggcggtcaggaaagatttcattccagcctttcggctatcaaagcttacgaaggcagcgatgtcaacctgattttccatgatgctgtacgtccattggtcagccaacgtattctaaatgatgtcatcaaagcattggaaacatatgcagctattgatgtcgccatgcctgccactgacaccattatcgaagtagatggagatttcattcatcagattcccgaccggtccaaactaaaacgggggcagactccacaagcttttcatttggaaaccatcagccacgcttatgaaatcgccttgaaagacgaacatttcaaagttaccgatgactgtggggttgttgtaaaatatttacccgatgtacctgtatatgtagttacaggcgaggaaagcaacatgaagctgacctataaagaagatacctacctattggacaaattcttccagttacgtaaaagtgagctgaatgaaattccattgaatgaaagccaactgaaaggcaaagtagccgtcatcttcggtggaagctatggaataggagaacatacagcccgtatgctacaggagaaacaagcaaaagtattctgtttttcccgaagcatgaacggtgtggatgtaggcaaaaaggaacaagtggccgatgctctaaaaaaagtattcttacaaacccacagaatagactatatcatcaacacggctggcgtcctcaacaaagagcctttgatgagttcggactatcaaacgatatacaatgcggtgagcaccaactatatgggaactatcaacgtagcgatggaggcgtacgcctatttaaaagaaagcaaagggaaattagttttcttcacctccagttcctatactcgcggcagagctttctacagcatctattcctctacgaaagcggccattgtaaactttgtacaagctatcgcacaagaatgggaaccgtttggcattgctgttaattgcatcaaccccgaacgtaccaaaactcccatgcgcgtaaaaaacttcggaacagaacctgagaacaccctattatcagcagaaaaggtcgcaattgccaccatacagtcattggtttccgaatttacaggacaagtaattgatgtaaaaagaaatgaagtatgaaaaatgaatttctatctacctatgtagccaataacctgcgagcctgccaactgaagcaactctccatattagaagaaatggaccgtatttgccaaaagcaccacctgacctactggctggacggaggtacattattgggagccgtgcgccacggaggattcatcccttgggatgatgatatagatataggaatgccattggccgatatgcaaaaattcatagaagtagctcctgacgaactatccgaagggttattcctccaaaccccacaaagtgatccttcaagcaaggaaccgattataaaagtgagggacttgaactctctgtatgtagaattcggcgataattttaatgcggattatcaaaaggggctttttgtagatatattcccatttattgattaccccagcatacccaaatcatgggtaaagaagctaaccaaaggaatctccaaaagctattccattctgcatacgcaacattattattctctacgtgccttcgcagaattcttttacttcggcacaaaatactggctgttcaaaggaatatggaatctgcttggtctgctctacaaaaaagatacttatctttccaatgttctgataaacaatggatacggtatcatgcaccgcaaagactctgtatttcccatatcagaaataatttttgaagggaaaccattcaaggcacctgccaacccagatgcttacctgaaagatttatataagaattacatggacattcctcccaaagacaaacagaaaatccatgccatttatattcaccccgaattgataaagaaaccatgaaaccgttccttgtagatgtacccgtactcattttgttcttcaaccgcccgcaacaactatcacaagtgtttgaacaagtcaggaatgcccgtccctccaagcttttcctctatcaggacggaccacgtggcgaacacgacctgcccggtataaaagcatgtcgtgaagtgacagatcagatagactgggattgcaaagtccatcgcatgtatcaggagaagaactatggttgcgacccttcggaatacatctcacaaaaatgggctttttctatggttgacaaatgtatcgtattggaagatgacgatgtgccttccgtttcttttttcacattctgtaaagaaatgttagacaaatacgagcaagacacccgtatcaccatgattgcaggtttcaataacgaagagattactccggatgtaccatacgattatttctttgcctccaccttctcgatttggggatgggccagttggaaaagggtcatcgaccaatgggacgagcattatacttttctagaggataagttcaatatgcaacaactggagcagctcattaaagaacggaaattccgcaaagactttatctacatgtgccatcgccataaagaaaacaacaaagcctattatgaaaccatcttccacgcttccatgcttttcaactcgggactggctatcgtacctacccgcaacatgattaacaatttgggagtcacagcagattccacccattttgccggttctgttcatacactgcccaaaggataccgccgcatcttcaccatgaaacggtatgaagtagaatttcctctcaagcatccccgttatgtcattgagaatgtagcttataaaaaagccgtctaccgcatcatggggtggggacatccctggattaagataggacgttctttcgaagaattatttctgaacctgcgatacggcaatttttccatcattactaaagcaataaaaaacagaattaacaaatggctgaaaagagaccaacaccggtaaaaccactcactatttatttttatcacacccggttaacccgtgaaagttacgaggaatggaaagattataagtttccgggacacattctctacggacttcctttgctggaaaaatatggcatccggtcggtaatgcataaatacaaagctttccccggccgtctaagactgatgctctatgccactaaagagattctgtgctgcaaagagccatacgaagtactctacggtacatctttccgtggactggagctaattatcctgctcagagcattaggattctaccgcaaacccatcgtcatttggcatcacactgccttaaaaacttcatccggaaaaataagagaacatatctcacgtttcttttataaaggcattgaccatatgttcctattcagtaaaaaattgattaaagactcattagcgaccgggaaagctcccgaagaaaagcttcagcttatccattggggaccggatctcgctttctatgaccatattctacaagtaatgccagatcggaaaccagaaggctttatctccaccgggaaagaaaaccgggatgtaaacactatgctgcaagctttctgcgccaccgaacaacaactggacttgtacatcgcccccaccaatggaagtgtaaactaccaacagattattgaaagcttttgtctacccgattctgtacaagtacactatacggacggtgtcatcccatacttattggcacagaaagtggcacgaaaaagctgtgttgtcatctgctgtatggattttccttataccgtaggccttaccacattggtagaagcctttgcattaggcatccctgtcatttgctcacgtaatcccaattttgaaatggatatagacaaagaagaaataggaattaccgtagcctataatgacgtggaaggctggatcaacgccattcatcgcatagccgaccatcccgaagaagcccaaaagatgggcgccaacgcccgaaagttggcagaaaaacgtttcaatttggaaatcttttcccatgaaatagcagaaagcttactggaaatatctaagatgtcctctaaaaaacgtacatttgcataaacttttatgcacatgagagtacttatcatcaatacgtctgagcgaataggtggagccgccattgcagccaaccgcctcatggaggctttaaaaaacaacggaataaaggcaaaaatgcttgtacgtgacaagcagaccgaccagataagtgtcgttgaactaaagaaatcatggtggaaagtatggcaattcatctgggaacgtgtcgttatctggcaagccaaccacttcaagaaacataacttgtttgccgttgacatagccaataccggcaccaatatcacagtattgcccgaatttacccaggccgacgtcattcatctgcactggattaaccaaggtatgttgtcactgacagatatccggcgtatcatccaatccggcaaacccatcgtttggacaatgcatgatatgtggccttttaccggtatctgccattatgcaggagattgcgataaatatgccacacaatgccacaactgtccgcaactttacaaaggaagcagaaaagacatagcctaccgtactttccagaaaaagaaaaaactgtttgaaggagcacaaatcacctttgtagcttgtagccgctggttagaatcattggctaagaaaagtgatctgattaaaggtcagaccattaccaatattcccaatgcaatcaacaccaacctgttcaaacctcgtgataaaaaacaggccagagaaaaatgccatcttccgcaagacaagaagttattgcttttcggctccgtaaaaattacagacaagagaaaaggaatagactatctggtatcagcttgcaaacaaattgcttcctcatatccagattttagtaaagaattaggtgtagtggtttttggtaaccaagccgaacaatacacttccctgtttcccttccctatctatccgatgaattatgtcagcaacgagaaggaactggtagatatctacaatgcagtcgacttatacgtcacaccttctttacaagacaatctacccaataccatcgtagaagcaatggcctgtggtattccgtgcatagggttcaatgtaggaggtattccacaaatgattgaccacctgcacaacggttatgttgccgaatatcagtcttccaaggatctggcaaacggcattcactgggcattgaccgaaggagaatatgaaagtctgagtgaggaagcctgccgtaaggcagtatccagttattcggaaagtaccattgccaagaaatatgttgaaatctataacaagattacagggaatcatgcataaccatcatcctcatcccaagttttctattattaccgtcacctacaatgcagcaaaagtgttagaggatactatacaaagtattgttacacaaacttataagaatctggagtatattattgtggacgggggatcaacagatgaaacactggatatcattcacaaataccaggaacatatcaccactgttatcagtgagcccgaccaaggtttatacgatgccatgaacaaaggaataaaattggcaaccggagattatctttgtttcttgaatgccggtgatggcctgcacgaggatgatactttgctgcaaatggtacattccatcaatggaacagccctgccgggagtgctatatggagaaacagaaatagtggacagtcaagggcattttttatacatgcgccgcctgtctgcacccgcaacgcttacctggaaaagcttcaagcaaggaatgttggtttgccatcaagcctttttcgcccgccgtgatctggtagagccatacgacctgcaatatcggttctcggcagattttgactggtgtatccgtatcatgaagaaagcggatgtactccataatacccatcttactcttattgattacctgaatgaaggaatgaccacccgtaaccataaagcctccttgaaagaacgcttccgtattatgagccgtcactatggatgggcaagcacagtgacacaccacttatggttcgttctgcgcctgctctacaaataatccggaagtctgactaataacgggactcaatcaattttcctacgggcctttctgacctgcaagaacaagaacaagaccaacacacagggcaatacacccaatgccacaaaagccaccgtttccgtaacatgcagcgatttcgggtcgaacttaaattccactacatgctttccggccggcacattcattgcccgaagaatataatccgctcttccgtgcggcgcttccacaccatcaatatatgcctgccaaccgggatagtaaatttccgagaaaaccactgttcctccagttttggaattaacctcatatttcaagtcattaggttcgtacgcagtcagtttgattgtactcagtgtatctgtttcagctgccgattttacctccgcactgaattttttatctacgacagccgtttttgccgggtctatccgatgcaaagcgtctatctcttcattggcattgtccacatactgcacctcgtttacaaaccaagcattgcccagcgtatgaggattccgtattgggacggtctttccaccttgcagcggaaaaataaagtaacgggtattcagcatattcaacacaggaaatccggacggagccaccttctgcatatcacctcccgcctccgaaacagccttgaacacgccattcatctcggtactgatatgctcctctatcatttcctgatagcggcgcagtttggcggcatgatatccaccgatgctcttatgccaataagaagtcgtattttcattaaacgtattgccggctaggttcagtacccggaaatccaacgttttatcggccaatatcgtcttatccgtttcggtcggtttaaaggaattatcctgttgtaccttttccacaaactggtcatcatacaaataacgtttgttcacactccacatatctgccagacagaggacagccaatgccagaatcgtcaccttcgctttcagcttgcccatgccatataaccaaagaactgccgtacctatcataataataaagaagctgcgccatgcatccgaagtaaagacactccgacggatttcttctagattagcaagtaacggagccagctgatctgccggaataccctgcaatgcctgcatttccatgcttgaaacatacgacgggaaaaagaaaccgggagccaatgcaaacaataaagcgataccacctgtcaatcccagactgatataaaacgaccgggcccgttccttaaccaactgaggacgtgccattacctcctttaaagcaaggacagccaacagaggtatggtaaactcagcaatgaccaaaatggaagaaaccgcacggaatttatcgtacatcgggatataatccaaaaagaaatcagtgaatcccataaaattctttccccatgacagcaggacagacaaaacagtagcactcaaaagcgcccatttcataggacctttcactataaacagtccaagaataaacagaaacattacaaacgcccccacgtatacaggaccggatgtaccgggttgctcgccccaatactggcctatctggctatagatgctattatacataggattcgccttttccatcgccttttcgttagctgctaaaggtacggaagcgccacctttcacattaggaacaagcaaagagaaagtctcaccgataccgtaactccactgagtgatataatctcgttccagaccacttttagtctgattatgactatccggtttcaccagctcactctttccacgcatcgtttccttactatactcatacgtatgatataagttggatagatttatgcaaactcccaaaataccggccatcaacaacaccccagttgctttcagaaattgcggcatttccttcttctgccaagcatccactccaaacgcaaccgccataaagagcatgacaaatagaaaataataactcatctgcacatggttcgacactatctgcaaagcaacaaaaaccgctgtcagcaaaccgcctgacaagtattttcctctataagccagtaccataccggctatagtgggtggaatataggccaaggttacaaatttccagatgtgtccggcagctataatgatgaaaaaataagaagaaaatgcccacaacacagcccccaatgaagccagccagaccgagaaatcgaatgcacgcaataatatataaaagcccaacagcatgacaaatacataccacacataattcgggagatacaaatgatacaacttctctactcccttcagggtatccgtagaatcataactgggtgccatctgataagtaggcataccaccaaaaatcgaattagtccagcgcgtacgctctcccgtacgttccagatattctttcgcttcttcaccagcaccaatgcccgccacagagtcatgttgtgaaaggatacgcccttctgtcactgccgggaaaaaatagacgaatgagatgacagcaaagaggataatcactactatatcaggtagtattcttttaaataagttcataagtatatctgtttattaacgttgcaaagatacgatatactctgataaaatgcgtacatttgcagccataaataaagttgaattatgaaaataggaattataacagccatgagttccgagcagaaacaagtagcgcaactgctcgaaaacaagaaagaatacaccgaaggtcctttccaatatactgaaggcagcattagaaataataccattatcctgatgaaatgcggaataggtaaagtgaacgctgctgccggtactgtagaactgatccgtaccttccagcccgactgtgtcatcagcaccggtgtagcaggaggtatagacagctgcctgaaaataatggatgttgtggtgagccgacaaattgtatatcatgatgtatggtgtggagaaggcaatgtgtatggacagatacaaggacttcccgcccgattcgaaggtaatgctacattgtttgattgcgccatgtcactggatactccgaccgccattcatggaggcctgatatgcagtggagacaaatttatcaccgaccgttccgaacttaacgatattaaagaaaagttccacgaagggctggcagtagatatggaatcgggagccatcgcccaaatctgttatatatataaggtaccgttcatcagtttccgtatcatcagcgatacaccgggagccgacaaccattgggaacaatacacaaatttttgggagactatagccgaccgttccttcgaggtcactcataccttcctttcctcattaccagctaatttataaaaacgaataatatgaaaacaatacccagttttaccattgatcatatccgcttgcttcgcggtatctatgtatccagaaaagacgaaatgggcagtgaaacggtcaccacctttgacatccgcatgaaagaacctaaccgggaacctgctttgggacaaggagccttgcatactatagagcatctagctgccacctacctacgtaaccaccctatatggtctgacaaaattgtctactggggaccgatgggatgcctcactggcaactacctgttgatgaaaggcgatttaaaatcagaagatattgtagaactgatgcaggaaacgttccgctttatagccaattttgaaggcgaagttccgggagccgcccctaaagattgcggtaactacttgcttcatgacctgcctatggccaaatgggagtcggccaaatatctgcatgaagtattggaacacatgacaaaagataatctgtattatcctactaaagagtaattctctacaacagaacagtagaaacgtaataacagaaaatagaaaagccgctctctgaaaagaaagcggcttttctttaagtccttttcaatagagattgaattacttacgtaatcctaatgctttaacaatagcacgatatctttcgatatcacgattcttcaggtagttcaacaacgcacggcgtttacctaccaaagttgtcaaagctctttcagtgctataatcttttctgttgagcttcaggtgctcagtcaggtgagaaatacggtatgaaaacaaagctatctgcgcttcagctgagccagtatcagtgttagactttccgtacttttcaaagatttcttgttttttagctgcatctaaatacataattcttagattttttgatatataaaattttcatttagcgggtgcaaagatagacattatcttttatatcacaatgaattagagctatttattttttaaataatcttctatctcttttactgtcgcatctttcagcaacacctttttgtccttatccaacagataaagagcaggcatcgctttcaaatcatagcattcttcggtcagtaccgtcaattctttatcatagctgttgatccatccatcaggaatttcattctggtgtttcgtccatacttcacggtcttcatcgggatagaaagcaagaattttcacttgtttcatgatgtggggactgttcaatacagcagaggtcttcattgtcgccagtgtttcggcacaaccatgacaatccggattatagaataacaataaagtgtaaggagtgcagatatcacgcatacgtttctgcattcccgaaggcaaggtataaataaaatcagcggcaatactgcccaccttgttcataccaatcaatttcaaatcatgttgggcacggctccgagcagcctcatcggtcagcgaagaagcagacaggaaacggcagacaggctcataaagctcctcattccgaaggggagaattcggatcaaacaagtatctgcggaaaatttccacaaaataaccaaacatttttttctcctgcgaagcctgctgcataatccggattaaacaactgtccgacagggaagatggcacacggttcaataagtccatgtaatctaccaaagcttgttctgtgatatccggtacatgaatataggcggtatccttaaaattaaaatgatcccagtaatgctgtaccataaagttcagccggtcttccggggattgcaacataatagggacctccggcaaagtgaaagtcaacgatttattatcatcattcacagatagagatttttgttttttgccatcacaagcgataagcaaaaaacagcacaagactccgatccatatatcagtttttctcatacgcttttaattaggcattgcaccttttacaaaagtagaaggaattctctgaaaagccaaattacttcgaaattactttatctcagccagccactcatgaaatccattgtgaggggtataatgtaatacatattccgttttgctgtagctgataatattttcgtgcgaaatccggcttacatccacttctgcttttgccagccacaaagtatcctccatgacataacaccctaaggacactctcagcatcatctggctcaggtagaaagcagactgttcataagcataccactttccatcctgttcccaatagatatatatcaagtcggaattgctcagctccctttctaatatggtcactacctctcacataggagttggcggtaatcgtttttaatcaatatcatctcagtgtctgaacacagggcaacaaaccacggaccgttcagcagtttgttcaggtctacttctaccttgtctaacataacaccgtagaaaaaacatgcctctttcagtttcaaggccgcctcactaagtttgcttaaggatttggcggaacgatggtaagcataccagcgcccttcctcttcatacagataaacttccgatttactacatgattctttgtccattatttccagtaggttgttcatactatttaacatcttttacacaacgaacttttagatcagcatcagtagcatggacagttacattggttccttggaaccaaaaaccataagaagacctataagcaccatttgctttacttcctgaatagtccgtgcggcaggtaacataaccactcaacagattgtttgcgctcatcagacccagttctttctgattaggcattcgccaaattcctttatcagtttttccgctatcctcataatagtatttacaaggatcatattccggtcttttcttattcttaatcgtataataattattattccatccaccatccaccatcttttgttttagatagtctttagacacttgtatccgtgaagacaatccattgatttcatcacgctccaaatggatatctatagtttctgtagtccctttggttgcagtcaaacctgtcaatgtaaatatattgtcactatactgatagaatttattcgcttcgtacagtccgtcgtctgatgccaacgtacgcacacagcgaaccaaattcgcatgttgccaaccggtattaacctctttattacttgtggacaacccttcttcagcccaaaaaatgctattggtaccggtagaagccgtgaaatagtgatatttagcattctctttgtcattatcattgagcgtgctcattttagccctaaacaagcgggcgtccgggtcaacgctattcaatgcaccctcgccataccacaatccgcgatactgatcaacagaggccatataccattttacctcattagcttcaatcgtgccgtttccattcaaatcccggttacggctcatacatgcccgtaccgcctgttggtacatgggttgcctcccatctgccggtacaatcatattagtgtccggataccatgatttttccttgttgctttgtacggcactgttacgggcattccaagcattaggattcttgtgctcacccaaattattcttattcaaataataagcagtagacaattcttcctcggttatattctccgttccataaggataaccattgaaaccgaaatgatagaacgtagtaatggaacgctgagaaagactgtaacgcacttttgcataaagactcttcctgtccgtgctcaccgacaactgattggcaataagtatggtacgaggcgcacaattggaatagacagtccatgatttccctttataatagttttcgtccacgaaacaggtgtaataagcgtatccatcatttgagaatacttcatcttgattgctatccgcattttcgtataatgccttcaacataaagaacacattaacccaagatgcgccatatttatttgcatactcattattgtcacccggatatttggcaacggtggttaaactctgtcctgaaattctgtttttagaaacattgcgtacaaaacgcagccatccataatcatcctctccattaaaaaggctctgcccgcttatcggacggattgttcctccatcaaacgtagccaattgtacatcaccttcggcattaaagattcccccatcggtaacatacaaattctccgtataaccgaaaggtgttgagattcttactatatatccttttcccgcctctttcagcgtctttatattttcccgagagaatgtcagcactctggcctcataatgagcgtccaaatcaaaagactctcctccttcactgtcaatcaccaatccttccacataggggttgtctccctcgacttccgcttccactttgatatcctcgacaccgtttactttcaccttatatttataagagtaattccggcgtatattgaagtcttcaagacttccggtattactgaagttgccaaaatggatagtatacgaaacctccccgatagtggtgcctttcttataatttccacgaatcacgatataggaagaattatccggtgcattatcgaacgatttcacgtcatccgtataggtattcgtttcacgatccttccacatctttatctcacctccccgataggaacggatattctcgggaagataaaaagttaacgtttccccggccataccagaataagatgactcgacatctgcggtagtagcgtcagctgtaccattcaccaactttccaccgacagccacattatgcaattcatacgtactgggagtgaaagttactccgttaccggcctcgatggtaaatgtattcttcgccaatattctgtacagtcttataacgttgctttcgcttataacaccggctccattggttccggcagtaattgtaacagccttgcccccattcagataaccggacatcatgaactgtccgtcggtaggattaggggaaataatgtggctggcattaccatactggcgtttaaagtctattgcaaggaactcgtctcttgtcaatgaggaacctgccacatccgcttcatcaattcccgtcaatttatttttgtctgcgtcatccaagtaataaattgtactgttcaagttggcaagagcatagatatacgcttcaccggttattgcctttacagtaacggtttccggtccgggagtcggtataggactcgactctgtagccaccagctttttatatcctgtcagttctcctgccgcattaaacacataaaagtgtaaatcattcaacctgttttcagcagtactggcgcgcgaaacaatcacttcctgattggtctgcaactgacaattcaactgcaaaatcacctctttattctcttcaccggcagagtaagctatttcctcttccgagcaagcccccacgcctatcagtaacgaaaggcaaagcgccatatatttcggtttatttttcatatatagtatcctccacagattattttcttacatcaccgtcaccaaaatccaattcgccattatcaacctctgtccaatccattacttgatattgaagttctgcatctatctcgatcgtactcagtttaatattgaacaggtatgaatggttacggattacatcaaatatatctccatctccattcgtccggaatttaatagttcccactttggctttgttatgataggtataatgaaccgtcaatgaaatttcattcccacctgtagtattcaccttttccggcagataaatttcattttcatatgctgtcgtcacctgcaagccgtcataagtaatagtctgattctgtgctccggcaggaatagaaggatatatatattgaaccgtttccaccggatttggagtttccgttgaaacacaatagcctttgtcgttggcattgttcactattatctttgtgatagtgaatccttgatatccatcctgcatattcacccaaatgcccacctttgctacagcacgataaaggttgcaagccaagtccactcccgtaccgggtacagctgtcaaattgctgcttccccacatcgggatagctctttctgcaagtttccaaggtatcgtagatccaccataatgataaaccaattctttataaactttggcgatattacttcctttctttgtttccagaaaattacgtatagccgctccggtcgtataagacgctatcttattgtctttcaagttagccagaacaaccagtttcacttgttcgccaccgaccgttctcaacatggttccttccagctgacgagtataatagttgtcaccttcaacaggattgcctagtttcaaatcctgtacttgatacaaaaagttatcatttgcatcaacgaccaatacatatacatcatccgcagtcatggcactttgttccactgtggtataatctaaatcacctggttcgcttgcggcccgtccgccgaaattggagaatgccagtgtgaggcgtaccggtaccttcccgccatccgtagcctttgccacctcctcgtcctttgcacacgacgataggtacaagctgcagagcaccgccattagtatatatgataaccatcttttcatagattctattttttgttcgttgttacatatccatctcgttgaagcgtaccacccagtcattgataatgatgctggtgttaatccacttcatgttctcgtccaggaagaaagtcatgttgtattcgtcctgacgatccagatattcctgctgggtcatgtcgtgaccttcggcctcggtgagcaataggtattttaccaaggggatggagagtacggtctcgcccgtatccttgttggtgatggacaggcgcggattttgatccaccatcagtcggcctacggtaatctgggcaatggccacactgatattgctatcctcagtatcgccctcggcacgtgcgccttttgtgtccatgtccgtgcttccttgaacgcggtaatagggataatatgttaatgtttcgtctttcaacagcttgttgtcatagttcatcaggccgttgtcgtccgtaatcgtgaattcaaagttatcgacatctacagtcactccgtccatttgctggagaatgatgcggatgctgttggtattcttcaccaacggcactgtcaccacctgcgaggtggcagccctggaaaaggattgcttggtcacttcgccgtgccacaacgaagaaagcttgctgttaacgatagccgttccgtcttccgcacggctatacattctgtccatcttgcattgcagctcgtccatcgaggattcccccgcggtaaccaaaggtaccgagaatgaagcttcgttattcaagcccgcccaagtgataagatgatagtcacctggttccaaatctactttcatggtatatccgtcttcacccaaaacgtcaccttcttccgtcttctgatacaccaatttgccgttatcgtcaaaagcataaagcgtaacagtccccacctcgcgtgagaaagcatcggcatacttcatgttataatcatatttaaacttcactctgtactctacagagcaatccacatcttcttcatcgagtatgctgccgcacgacacaatggcacttcccaatgtcatcgccatcattaggctgaaagagagttgtcgggcgaatgtttttactgttttcatgcttttgtttttttaatgttagaatatttaaagagaatagcagggagaggaggaacactcctctcctgcttatataatagggttattaattagaaattaacagtgttaaagcgtacaatccaaggagctattgtagttgtcagtttcaagtatgcactttcatcgtctattgttccaccatcttccggtataattgtcgagctgccgatttccttgaaagttccaatcttcaatgaatagatgttgttacgcatgatagcatattgcatattgttttcgtttcctttgaaatgttcgataggtgcgtagtaataacaatatccatctgtataagttaccaaattctcagccttataagccgggtaaacagatttcaaagcatccattgaacggaaatactgattggcatatttatatatggtacctacattagtaccctcattatccaagatttcgccacggaatacaatacctgttaccacgcctttttgctggtgatcctttgttactgaattttcaaggcaataagtcaggaatgcatcgttagattgtgcaatttcaccaatttcaacatcacttgacttaggaaggtccttcaagaaagcattgttataaatatcctgtgaagtctgtaattcacctactgtattgaagaaataatctgtagctgttttatctccatcagcccacaatccgtctgttagtgtcacgctattcttgtccactgacttaggatctaccaaataatcactattagtcaatgtaccaaatggagagatggtactccaatcactggtcttatgtcttaccgcataaacggtttttgacaagttcaccatagcatatttatccaaatacacagtccatgtctcctctgctgttgtagaagttcctttttcataatggaaagcacccgttctatctgttgctacaaatacaggagcttctattgaagtcgttgtttcattctgtttaacattacctttatatttattatcaagagttgactccaactgatatctgcccgtttcgtttccaccatttagcaaaacccaaatttctgcattatcagcgtcaagtaaagccttgttcaatttagtgatataaatgtagctggttttatcagctgttgttgttttcaaccatccgtcagtggttaccgtagggatagtggttactttaacctttacattatatttattgtcattattgttcggtgtaaatgttatcttggaaaccacacgctccactcttatggcttgaatgataggttgtgtagggtcctgacttgtgatatttaccattgccgcttcactattagccatcataaaatgatctcttgccgatgcacctttcgtaacaacatcaacagatgcgtcgttagagcttcctgcggtaatagaataatttgtaacatactcatatacaccagcagctgttgcacttgtttcttttgccttatttgctatatctgcacaaggattcaaaataaccaatacattataactacctgtttggttcaattggaagctaggttcgtaaacgccactcgttacagttatattatcagcatactccactaatcctgtcgctgtatttccctgaaccgggctaatgataatgacagcatctttaatactaccttccgagggtgttccattttccacatcatctcctgtttcagcatcggcagcacgtcctgaacctgtagaagtagagatacttaatgtaaggttagctttcaccttttctggttgttcaatattgttgttttctacaatatcatcgtttgtacatgctaccaaagcggcgcaagcaaacattcctaataataaacccttaatcttcataatcttaagtttttcagtttataaattctttatttttgtaatttctattcttgttcattgatattgcaaaggtaaaggccttttaaggttagtcttaattggtgttttcggcaaaatagattggcatctttgacaaaatgacttttggagtctttttgaagggcattttcttcatccatgaatgaaacgccctatactttgcaagaatcgccacttatatttttcgtagcgataaacaaaaaatacgccgccatatatgtttgtatttttcaatttgttaaattgttcaatattcatccttttgtctaactgaacttcctgttacgcttcccccttttgatactccttctgaagttggtgaagtgcatttcattcaaactccttatttatctggtactttctttccgtatcggatagtcatggaatatagcggattcagagattgcggacaagtgggagaaaatactaagaaattcagcttcacggccactacactacgccagattcaatccgcacctacagtagaggttcttcaaagagattggttcaaatccagcaatgaggtgtttccttaaggagtcgttcacaattatttcacctaatattccggtctgaattccactcataatgcagttccaaaaagtaagtgcagttcatgaagcaagtaagtggccttactttttttctataatatgggtaactgtccggatgaaaaaataataaagatatttgcgagtatctacttatcaggtttaataaatagctatagccataaaattcaaaatccgggaatagactctactaccccggattttaccttgcgcttttcacaaagaacaagtttcttctaacatcttttattgtactgtttgtctatatgtcttattttccaaagattgcatcatctttacgtttattgaccatttcttccaaattggcaccggcttcaacagaacctttggcctgcgcctgtttgaaataactttcggcagagtcgagatccccttgcaacagtttcagcacgcctctgttgttcagcgtcgcactcgcttgtgcatcagccttatccaaataacggactgactgttgcaagtcacctcgttggagttcgatagcggcagcgtttatattcgctgttgggtcatcagggaacatgcgcactgccacatcgaacacttcgttaaactcgttgcttcccttttcgtatgtctgagcaaccaagaacatttcctgcaagctcaactgctggggacgggttcttataatctgtttcgcttcctctacattgaatccgcgtactacataacgcactgtgtaatcagagtgacgcaaagccggatagcaatcttgtaataacgtggcatatacttttccaccatccaaggctttaatgcatccctccttcacatcataatcgttttcattcttatctattatagacaaaatttcatctttcagcggtaaagcattctttgtgacatattcacgcaatccagcccagtcttcgggcacagaattcactttgaacagatctgctttaaaaccatactcgctcattacatagttctttaacgcttcagcacgaccttgcgccagacgcgcattagccgcatatctgccctcaggagaggcataacccacgatatctatttcagtaatggtagtattggcagcattcttcaccacatccactgtacgcttgatagctgccagttcagagggattacgacgataatcaggataaatcctggtctggtttaccggaaaatccaaataagcacggccttcttcagcacgattcttcacagcctcgacagcaggagaaacaaatgccacagcaggtttcaccacataacgctccaaattggcacaggtcacaaaggcgctgctttcttctttttggcaattgacacaaccacggacatcagccaacagttccagttcagcaccattcatccatttttcgtatggaatacgggctgaataatttacagtctgttccgttccattcttacgacgaagaatggtatatgcatccgacggaatactgcgttcacgctgttgcacgatggaacggatacgcccatatacccaaatagcaggcaaaatcctgttataactgttatcctgtgtcttcaaaaccggagtcagagttgccacacagttggaagaaagctccattgcagtcggcaacgtgatatccattcctatcatcacctgtccattatcactaatcaggattgactggttgctgacttgtacctgaccacctgataatgtctgtgcacctaccggaatagtcggaatcaataatataagaagtatataacatataagtttcataatccgtaatttttagaatatataaataagattcagagcagccttagtaggaccccaataattcttgttggatttctccaacatatctccacattcttcacactcatatttcttataacgcacataagcataacccaagccgatggtggcgcccagattccaatgacgtcccagcacaaactgataaccgtaactgacaccgccaccataaaaatgtcccttataacggaagtctttcaaatcatcgaaaggagaaaacggcaaatcaataccggtagtattgtatgctcctcccattaaatggaaaccgaaaaaatgaccattgaacttatcacaaagccaataacgcaactcgggctgtaccatcaccagtttcagcattttattatcgctgtatttccagggattataataaaacggaatatccactgtaagcttcttgctcaaccctacttccactcctaagtttggtatggcgacggcatctatcgccacattagtcttaacagccacctgtccatacataaataaggaagaagccagcagacacacccatgaaaataaaaatcttcgtattaccatattcaattctctctagctaagttattttttacatcacaaaggtagaggctattcttttaacaggatattggcaaattaatctttattaagaggtggtttcggcaaaatacagaatgaacaaaaaacaatcttagttcctatttccgtcaaaaacagaacatccattcaatgagaaacattccaactatcaaatggaacaccaacggagttttctccatccataaatgaaaatcctttcatcatgataaaaacacccccttatatagccaaacaactccttctttccaacatagcaggtattttcatcaaaaagagggtgttttcatcaaaaaagcttgaaaataatttggatacatgaaaagaatacctacttttgtatcggatgataatgggtcaatcattcacataatcaaaaaaacaataaaaaattatagttctatgaaggcaatgcatttaataattgccatgctcgtcatgatgagtttggcatcctgctctgcagatggtaatgaccccgttgaaaactcagtttcaacgtatctcctggaaaaaacgtatggagccagaagcgttacatacgaggaaaacaattctgacaagttaaaattaagtgagttaccggctatcagcctttctgaagccgaccatattctatctgtcctacgaaaacatactgatgctcaagaagaacttgatattcaaactgccaccaaaggagaacaaacatggcttagaattgtaatgaagcaaacaatagatcataaatatgctttcactatccagttaaatatgaactgttacaatgacggaagcctctactatggcggatatcaggcggaatgttcttcttctttgataaaatggtatcttaaaggtttcagcctggctaccgataatgccacaaaaaattataaattcgaatcccaaagctatatttatatgaaagtaatagataatggaatcaaatatatgcagattcctgtcactataaatggcaactataatccccgaaaccatgatgctgcattttcctacaatttatgatatataatgcaataatcactttataatatataccatcattccccccttgtttctagcttagcctacataccttaaaaaaagcaagagacaaggggtgcacttcattcaaatacaatcgtctaataatcaaggaaaaacaaaacagtatgaacggaatacctaccatcctttatttccaccgaacctgttgatactaaaaacagaatatattcttatgatttttagttggttatgaaaatatagtttgctatatttgtaggaattcctaaaatagattaaggaataatatcaggcagattgtacgtgaccaatttgattacaggggaataaaagtgaaacaatttattataatgaaatctttaataatcaccttattatgtagtttttgtctatcaactactaatgcccaaagttatttccgccagtgtggtatccaactacttaccaaacaaaacggattgagcaacaatacattgactggaatctatcaggataaagccggctttttatggttaggaaccgatgttggactgagccgctatgacggaatacattttcataattacaatttgattgataaagagccacgtgccttagctcatttatatgaaacatcaaacaatctgctatggtcccatatcgccaatttaaaccaaatagcatgttttgacaagatgcgtggaatctatatgccacttatctcacctacccctgaggtattgaaagatatacaggatatatgtgtactgcaagacaaattatatgccttgacctccaatgtcatagtagagttaaagatggagaaaaatgcagatgaaataagactgaccgcccaaccgcttatagatataaaaacaaaagtcctaagactttataataacgaagatattttatgcgcactgacagtagagaatcaaatcttactttataacgtttccgataaaagtagcgagcatataaatggaaccgatctaggtattgtgaaagccgacaacattgaaaaaatacatatatataataataatgtgtggatctgtgaccaaaccgaaggaatcatctgttataatacaaacactaaaacatcccgcacactgaatgacaacagccagtcatccttcattcaaaaagatatacgcgatattatccagatagataaaaccacattcattatagccacatggagttcactgtcagccataagatttgaaacggacaactacctccagtcgccattccacattatagacctgacccaacatgattcttactatacccctatcctcaaaaacagaattaccgacatccattttgacaaatccaacaatgtgctttgggtaggaactttcggcagaggattactgaaactgaatctcaaaggaaacgatatcaaccgtatcctgttgaacgatgaaataagatatgtgaatggtatagcacaagatgccgatggatacatctggctggtcaccgaaaaagatggcatatataaaagtatagaaaataagatcttccccaatctgcgcttttccttatgggagaaaagtaacaagaataatcattattgcctgcacaaagatcgaaatggaggactatggttcggcgataacaaaggaaacattctttgggtaaatcctactactggtgaaacagtgattcaccaactaccccccgaaacagcagactctgctgtaactgctgctatcttgaaactatatctaaactcacaaaaccatttatggattgccaccgaaaaaggaataatggtctataaccatcagacacacgaatgtatagcagcacaaccttatacgaaagaattcaaaaaaataaccgctatatgcgaagatggagatggaaccatgtggctgggtactgaaaaagggatacaccgtgccaactgtaaagggaaacaaataaaattcactggtggttatgaaaaggaaagaaacctgacacccggaaaagtattagcactttatctgaacaactataaccaactgcttatctcgtacactgataaaattatccaaatagacggaaaagagaaaaccgtatcctctaccatgatcttgcaaaaggacttgcctaacggacatataagctgtatgatagatgataagaacggaaatacctggctaggaagcaatgctggttttatcacactaaataacaagaacaatgcatcatatacctatgcattaccggagagttattacgatgtatgtcggctgaatgacgggaaattactatgggcgaactctacagggttgctctattttgaaccgcgcactttaaaagaaagttcaagtaaccgccaattccatatctccgatatagatattaattacaataaagtagaaataggagaaaaaataaacggacaagtcatcctagacatacctgcgtacctgatagaacatttatctttagactacaataacaacaacttgattctctatctaagtgatttgaaatacggaacctcgcccaacacagtgaaatatcgcctgttacccacagaagaaaaatggaatacgaattatgacgatcatataaaactcagcaatatcactcctgggaaatatgtgctggaaatacgctcgtcttatccgttggaagaaaatgaacaaataacccggttatccatcaatgtaaatagatattgggctgcaaccggatgggccatcgccgcatacatcctgactattatcattatttccttgtttacatggatgtactttaaccggaaattacagaaacggcaagtttacaaagccaaagaagtgaaactgaaagaaaagctggaagaagaaacagaaataagaaaagaagaagagaaaaaccaccaattgcgtgaccaaatcagatatatgttggcacaggaattacgcactccgttatcactcatcactgctccgttaaaagaaatgattactaatacggccttcccggaatcattcctgcaaaaagctaaaatggcctatcggaattcaatcagcctgcaagacatttgtaaccagctattgaatattcatcagcaagaaagttacagtcttaaattgaatgtggccccctatcccgccagcgtgatagccgacactgtagttcgtgcctctcacgagctactgaacgtcagtcccattaacctgcattatgacaaagacaacaaaataaatacagaaatatggattgaccggaaaaagataacctttattctaagtaatatattatccaatgcctatcggcatatctcgtattccggttccatccgttttactgtaaacaccagtattatcaacggaaaggatttctgcctttttactatagaggatgacgggaaagaaatgatagaagagtcctctgttatcttccttggatcggataattacaaccctccaagcaaccggctacaccccgaattaggcattgaaattatgaaaacgacagtactcgcccaccacggtgatatccagatcactcaagaaaaaaacaaaggaacccgagttgtcctttatatccctctaggtaagcaacatttgaaaaatgatgaaaacgtatgtttcatcgaacccgaaacaatagcggaagatccaaataaagcaatgattaccgcagaggataagaaacaacaggaaatagcaaacagcataactgccaaacctattgacaaccccgaaaccaaatacaaactactggttgttgaagaccatgcagatatccgcctctatctgaaagtattattctctgctacctataatattattatggcggaaaatggggaagaaggagtaagaatagcgcgtaaagaaataccggatcttgtaataacggatgtcatgatgcctatcatgaacggttttgaatgttgccgtatcctaaaagaagatctaaaaacttgccatatccctattattctactgacagctttgacagatgacgaaaatatagtgaaaggaatagaattaggagctgatgactatattctgaagccgttcaatccggagattctccgcaccaaagtaaaacgtttaataaaaagccggactgaactgaaacagatttataccaaactactaatgccttccatcaccgtcaacggctcgcaagaagaaaatacggaaacaatcatcatagaagacccgttcatcacacaaattctgaatattgtaaatgagaacctgcaaaatccggaattcaatgtgaaaaaactggccgaaatgctgaatatgagtcaacctaccctttacaggaaagtaaaacaactcactaatttcactatcatagaattagtaagaggagtccggttaaaacgctctgccgaattactgagaagccgcaaatacaatgttcaggaggtggccgaaatggttggttataatgacatccccactttcagaaagcactttgtcgatttctatggcactactccctccacatttaatagtaaagaagatacggaagataaaaaataatcgttaacagccaaatattttttgaattaaaaatcgtacctttgcagccaaatatataggtatagtatgcaagacattagaaacattgcgatcatcgcccacgtagaccacggaaaaacaacactggtggacaagatgatgctggcgggacatttgttccgcaacgaccagacaaatggtgaactggtattggataataatgacttggaacgcgaaagagggataactatcctttcaaagaacgtttcaattaactacaaaggaacaaaaatcaatattattgatactccgggacacgccgacttcggtggcgaagtagaacgtgtactcaatatggctgatggatgtatcttattggtagatgcattcgaaggcccgatgccgcagacacgcttcgtattgcaaaaggcgttacagatcggtttgaaacctgtagttgttgtgaacaaggtggataaacccaactgccgtccggaagaagtatacgaaatggtattcgacttgatgttcagcctgaatgctacagaagatcagttggacttccccgttatttatggttctgccaaaaataattggatgagtactgactggaagaccccaacagaaaatctggttccgttgttggatgctattattgagcacattccagcaccgaaacagctagagggaactcctcaaatgttaatcacctctttagactattcagcatatacaggtcgtatagctgtgggacgtgtacatcgtggtaccctgaaagaaggtatgaatattacactggcaaagcgtgatggcagtctgataaagtctaaaatcaaagaactacatacttttgaaggcttaggacgtaaaaagacagatgccgtttcatcgggagatatctgtgctgtagtaggtgtagaaggcttcgaaattggtgataccatctgcgatttcgaaaatccggaaccattgccccccatcgccattgacgaaccgaccatgagcatgttattcactatcaacgattctcctttcttcggcaaagaaggtaagtttgtgacttcacgccacatccaagatcgcttgaccaaagaactagataagaacctggcattgcgtgtacgcaaaagcgaactggaagacggtaaatggattgtatcaggacgtggtgtacttcatctttctgtactgattgaaaccatgcgccgcgaaggatacgaattacaagtaggacagcctcaggttattttcaaagaaatagacggagtaaaatgcgaacctatcgaagaattaacgatcagtgtgcccgaagaatattccagtaaaatgatcgatatggtaacccgccgtaagggtgatttggtttctatggaaacacagggtgaccgcgtaaacattgagtttgatatgccttcgcgcggtattatcggtcttcgcaccaatgtactgactgcatcggccggagaagcgatcatggcccaccgctttaaatgttaccaaccatacaaaggtgagatagaacgtcgcagcaacggttctatgattgctatggaaagcggaacagcttttgcatacgctattgacaaattacaggatcgtggcaaatttttcatttatccgcaagacgaagtatatgccggccaagtggtaggtgaacatgttcatgaaaacgacttggtgatcaatgtaactaaatcgaaaaagcttaccaatatgcgcgcatcaggttctgatgacaaggcacgcatcattcctccggtagtattctcgttggaagaagcattagaatacattaaggaagatgaatatgtagaagttactccaaagagtatgcgtatgcgtaaagtgattcttgacgaaacagaacgcaagagagccaacaaaagctaatcaatctacattgaatataaaaaaatcccgaaggccatattaccttcgggattttttatctctaatctacaaacttcactttactaacctctctaggtttagcagccggcatttcatcgggataaccgaaagcaatcgcataaagcaactcatacccttcactgaatcccaactttttcatatattccgcagctgcaggtgatttcatgaaacgcacaggtcctcccaaacaacaggaacctattcccattgaccaggcagacaaaatcatattctcacccaacaaaccacaatcgatctgtgacatatcatatgcaggatcgttagcaataaacactactgtaggagcattattgaacatattcttaaatcccggacgttctgccgctttgggattttcttttttgaatatttcagtcaaaccattgataaattccggattatctactacacgaacctcccatgactgtttattcattccattaggtgcattgattccacattctactatagtctgcatcttttcacgctccacagcctcgggcttatacttccgtatactacggcgactcataatagtttctaccacagggtttacctggctcacggaaacactatccgcaacaacttccttctgtcgggagccttgcgatgtacagctgcataatacgaacatgcctgcaccaactaacattaatctaaataatttcatttgctatcatatttggtttgcaacaaatctaggcattttcaagcataaaaaaaagtggttcctttataaggaaccactttttatatgttaaatctgtaaaattcaaattacaacttcggaccagcagcaaccaatttcttacctgcttcgttaccagtaaacttagcaaagttcttaatgaagcgaccagccaaatctttagctttttcatcccactgagcagcgtcagcataagtatcacgaggatcaaggatcttcggatcaacacccggcaattctgtaggaacaacgaaatcgaagtaaggaataaccttagtaggagccttatcaatagaaccatccagaatagcatcaatgataccacgagtatcacggatagagatacgtttaccagtaccgttccaaccagtgttaaccaagtatgctttagcaccagtcttttccatcttcttaaccaattcttcagcatacttagtaggatgcaatgacaagaaagcagcaccgaagcaagcagagaatgtcggagtcggttcagtgataccacgttctgtaccagccaatttagctgtaaatccagacaagaagtaatactgagcctgttcaggattcaagatagataccggaggcaatacaccgaatgcatcagctgacaagaaaataacttgttgagcgtgaggacctttagagataggtttaacaatgttttcgatatgatagataggataagaaacacgagtattttctgttacgctcttatcagcgaaatcaatcttaccgttaacatcaactgttacgttttcaagcaaagcgtcacgtttgatagcagcgtagatatcgggttcgctttccttatccaagttgataactttagcatagcaaccaccttcgtagttgaatacaccttcgtcatcccatccgtgttcatcgtcaccgatcaacttacgtttcggatcagtagacaaagtagtcttgcctgtaccagacaaaccgaagaaaatagctgagctagttccttccatatttgtattagcagagcagtgcatagaagcgataccacgaagcgggttcatgtagttcatgatagagaacatacctttcttcatttcaccaccgtaccaagtattcaggataacttgttctttagtcttcaagttgaaaacagtagctgtttcagagttcaagcccagttctttatagttgtcaacttttgctttagaagcgttgaaacatacaaaatcaggttctccataagcttccagttcttcagcagtaggacggatgaacatgttagttacgaagtgagcctgccaagctacttccataatgaaacgtactttcatacgagttgcagcgttagcaccgcagaaagtatcaacaacgaacaaacgcttgccgctcaattgttttacagctttagctttcaaatcagcccaagcttcttctgtacaaggtttgttatcatttttatattcgtcagaagtccaccatactgaattttcagaagcttcattcttaacgaagaatttatctttaggagaacgacctgtgtaaacaccagtcattacgtttacagcacccagttcagtaacctgtcctttttcgaaaccttccaatcccggtttagtttcttcagcgaaaagcacatcataagaaggattgtggagaacttccttcacgtcggtaataccgtacttgcttaaatctaaatttgccattttttaatgatttaatttggttattgtataatgttatttttactctttattttctgagagaagatgtttttcaacacccccttgtctaaggcgctacaaaattagtgctttattttaaaaaaaagaagttattagagaaaaatttccgtaataatcaaatatttatatttgtgtaacaaaaatgcaattcgtactttacaaatctagaaattatttgtttctttgcaggtcaaagtcaacaatataacaaaagcatagatatgaaaatcatcaatctcagtgaaggcaattctctcctaaaccaatatgtagcggaattgcgcgatatacatgttcaaaatgaccgtatgcgtttccgcagaaatattgaaagaataggagaaatcatggcatacgagatgagtaaagcactaacctattccgtaaagcaagtacagacacccttgggaactgccacggccagcacacacgatgacaaaatagtgattgcaacggtattccgtgccggactgccgttgcacaccggttttctgaacatgttcgaccatgccgacaacgctttcgtttccgcattccgtttttacaaggatgacgagcaccgtattgtagatgtgcacattgaatacatcgccgccccttcattgaatgacaggaccttgcttctcgttgaccccatgcttgccaccggtgaaagcatggaacttgcctggaaagctttccttaccaaaggcaaacccgctaaattgcaaatggcctgtgtcattgccagccaacaaggggtaaagcatatggcagaactttttcccggcgatgatgtcacattatggtgtgccgccatagaccctgtcttggacgagcacaaatacattgttccgggattgggggatgccggtgatttagcattcggcgagaaactttagggctcaaactataaagacagtttcacgtgtgttcgcttgcacacactaaaattctaaattaaatggttagtaaccggcaattattcacagcctattactaaccatttaatttttaaaacagttctgtagatctggtccctacagggaagatgaaaaatcttatttcacttcccaaatatcatttgtcatcagtaattcctggaaattatgatattttttctttgcggccacttcttcaatctgtgcattaacagcgtcatcataagtaggcgcctccacatcacggatcacccctaatgcaaccggaaaatccggtccttccatcaatgccagtttcaactgcaaagtattatccatacaatgagcatcgtgcactaaaatatctttttccgtcacaccattctcaccaagctttaccactttcagtccgaaaccttcctgcatcagcccgtattctttgtctacaccaaacaacatcggtttaccgtgttctaaataaatggcattctttgaacgaccttctttcgtatatactgattcgtgtgttccatcattaaaaatgacgcagttctgaagaatttcacatacagccgcacctttatgattggcagcagctttcagaatctccactgtaccaggaccatccgtagctaccgcacgggcaaagaaacgtccacgcgcaccaaaacataattcagccggatgaaacggatcttccacagtgccgtaaggagatgatttgctaacaaatccacggggagaagtcggagaatactgtcctttggtcaaaccatatatacggttgttcaacaaaatcatattcaagtcgatattacgacgaacggcatgtataaagtgatttccaccaatagccagcccatcaccatcccctgaaatctgccaaacagtaatctttggattagccaccttgcagcctgtagaaatagctgccgcacgaccgtgcacagtctgcatggcatatgtattcatgtaataaggcaggcggctggaacatccgatacccgaaataacggcagtatcatgaggagccactcccaattcagccatcgctttgtgcagcgaagccaagaaaaaatggtcaccacaacccggacaccaacgaggttgtccctttttgaaatcttttgctgtatattcgttcatagtctttactttctttacggttattatttatttaaaatctcagtgaaagcatcaactaactcgctgactacgaacggctggccttttacctcattaaactgataaggaacaaatccgtccactttcatacggagatatccggcaaactgaccaagattctgctcagccacgactaccttcttatatttcttcagcacttctgccgtattttgaggcagcgggttcaaatgaacaaaatgtgccaaagcaaccttcttgcctgcatggttcatttcctccattgctgaatataaatgaccgtaagttccaccgaaacccactatcaacaaatctgcatcctctacgcagccttgcaccttaacatcaggcactggaattttagcaatcttctcggcacgcaaacggcacatcaaattatggttttcaggctcggtagaaatagcacctgtatcactgtctttttccaagcctcccaaaatatgcatataaccttcctgtcccggcaatgcccaataacggacacctgtttcagtattacgcttgtaaggagtataattatccttcatttccggagtaacatagggtgggttaatagccggatagtttgccagatcaggcaatttccatgcgccggaaccatttgctacaaaaccatcagtcagcaacaccaccggagtcatgtgttccaaggcaatcttacaagcatcataagcagcatcaaaacaatgagttggagaagctgcggcaatgaccggcataggagattcaccgttacggccaaacaaagcctgcaataaatctgtttgctcagacttagtaggcaaaccagtagaaggaccgccacgctgtacattaataaccaccaatggtaattctgtaataacagccagattcatagcctctgatttcagacaaacacccggccccgaagtagaagtagccgccaacgcacctgcaaacgaggcaccgatagccgtagcgcaacctgaaatttcatcttcacattgaacagtagtcactcccaatgatttatgtttagaaagctcatgtaaaatatctgttgccggagtaatgggataagatcccaagaacaaacgcaggcctgctttctcggcagcagcgatcaagccataagccgtagccttgtttccgctgatatccatatactttccggggactttagacttagtttccaccttataagtatgatccacagacgcatgggtattgtggccataatcatatccggcgtgtatcactttaatattcgcttcagctatttgcggcttctttgcaaatttctcgcgcaaaaaattttcagcaaccgccaggtcacgattaaacaaccagcaaaccaatcccaaagcaaacatattacgacatttcaacattgacttgttgtccatgcctgtatctgccagacagtctttcaccatctgtgaaataggagcagcaattacatcctgcttaatacccatttcttcaatcggactgtctgttttgaaagccgccttgtccagatctgatttctgaaaacaatctgtatcaataatgatacaagctgtggacttcgcaaatttgtattgtgttttcaatgcagcggcattcattgcgaccaatacgtcgcatttgtcaccaggagtaaaaactttacccgcaccaatatgcacctggaaacctgacacaccggtcaacgaaccttgcggggcacgtatatccgccgggtaatcggggaatgtactgatatcatttcccactgtagccgaaatattagaaaagatatttccggccagctgcataccatcgcctgagtcgcctgagaaacggaccaccacttggtccaactccttgactatcatttcatctgccataacttattatttagggttacaaaatttcactgtttgcaaagttcggaaagttctgtcaaaggacaaaatattccgctgtcaaactacgtttgaatatcaaaatgtacaaaattaaaggtttatttatttccaagctaagaaaaagtagagataattacctgtttaaaagcataaatttctatcattatgacagcagcaaaaacgattcatttttacaatttattatttttatccatgttttataaacaacatgaaagttcatagcagaataataacattattagattataaaaaacagacaaaaaacaacaaaacaacaaagaaaggattattttcttcccacttaagacatttttcgatctttcatattgccattttaacaaaaaggagtacctttgtagccataaaagggccttgtagttcaacggatagaatagaagtttcctaaactttagataggggttcgattcccctcggggctacaaaagcagtaaacaattactatacaatcatttactgcttttattttatctagaaattctttagattacttatttaatcaccccaagttctttacccactttaataaatgcagcaattgccttatccaaatgtgccttttcatgaccggcagacaattggacgcggatacgtgcctgccctttcggaacaaccggataatagaaaccagttacatatatgccttcttcctgcatcttggcagcaaaatcctgagacagtttcgcatcataaagcatcacagcacaaatcgcgctctgagttggtttgatgtcaaaaccagcagccagcatcctgtcacggaaataattcacattatccatcaacttagtatgcaaggcatcactttccttcaacatcttaaacatttccaagctagcaccgataatggcaggagctacagaattagagaataaataaggacgtgaacgctggcgcaacatatcaataatttctttcttaccggtggtaaatcctcccattgccccaccaaatgctttccctaatgtaccagtaaaaatatccacacgaccgtatgctttaaattgttcggccacgccatgccctgtaggacctactacaccggccgaatgagattcatccaccattaccaacgcgtcatatttttccgccagttcacaaatcttatccaatggagccacattaccatccatcgagaatacaccatctgtagcaataatgcggtgacgctgtgcctgcgcttcctgcaaacaacgttccaagtcagccatatcagcattagcgtaacgatagcgttttgccttacacaaacgtacaccatctataatagatgcatgattcaacgcatctgaaataatagcgtcttcttctgtaaacagcggttcgaacaaaccaccattagcatcaaaacaagcagcataaagtatagtatcttctgttttaaaataatcagaaatggcagcttccagctgtttgtgtaaatcctgagtcccacagataaagcgtacggaagacataccgaagccatgtgtatccattgcctctttggcagcattgatcaaacgttggttatctgacaaacctaaataattgttggcacaaaagttcaacacatcttctccgtcattcaccttgatgtctgcacgctgaggtgtggtaatgatacgttcatttttatacaatccggctgccttaatatcagccagttccttcgcaaggaactccttcattttaccatacatagctttgtttttttatttaagtatatagtttaagtttaaaaatcagtctgacttgacaaagttcttatttttttttgatatccaattaaattatagagaaaattttgataaaatatgcagttttctatctatctttgcttccaaaaggaaacttaaagcaaatagcaaactatgaaaaatgtattaattatcggctccaccggtcagatcggttcggaactaaccatgaaattgagaagtatttacaatggtaatatcgtagccggatatattcccggtgccgagcctaaaggggaattaaaagaatcaggcccttctgccatcgtagatatcaccaatgaacaacaaattgccgaaacagtatcaaagtacaacatcgacaccatttacaatctggcagccttactctcggctgtagcagaagccaaacctcaactagcatggaaaataggcatgggaggcctgtttaatgtattggaagtagcacgcgaaatgggttgtgccgtatttaccccaagttctatcggtgtcttcggtaacaacacccctaaagacaagactccacaagacactatccgtaatccgcgtaccatgtatggcgttacaaaagtatcaggagaattactgagcgattattaccatatccgttttggtgtagatacccgttccgttcgtttccccggattaatttcgtatgtcacacctccgggtggcgggaccactgattatgctgtagacatctattattcggctgtaaaaggtgaaaaatttgaatgtcctatcgcagccgatacattcatggatatgatgtatatgcctgatggtttacgtgcagccattgaaatcatggaagcgaatcccgacaaactaattcatcgcaattcgttcaacattgcttcaatgagttttgatccggaaattatttataataatataaagaagtatatgcctgacttccatatggagtacaaagtagatccactacgtcaagctatcgccgaatcatggccgaactcactggacgacacttgtgcccgtgaggaatggggatggaaaccggaatatgatctagacagtatgacacaggatatgcttgccaaactaaaagtacgattcaataaataaaccactaatattgaatgtataaaaatagccttctctattctatatggaaaagatagagaaggctatttttatacatttcttgcacttatataaaattttgatcgtatcttcgtgcaaattaacatactgattaaaaacatactatgaatacaagagctattaccaaaaacaagaaagtcgttacattcggagaagtaatgttaaggctgaccacccccaatttccagcgcttttcccaaacaaacgagtttattgctacttatggaggaagtgaagcgaatgtagccatatcactggtcaacttcgacatctccacagaattcgttaccagacttcccgagaatgcaatggcacaagcttgtgtaaactcactccaagcttacggattaggtacagacggcattatttatggcgggaaacgcatgggattatactttctggagagcggtgcagcatttcgtaactccaatgttgtatatgaccgtgaaggatcttcctttgccactttacgtcccggcatgatagactgggaaaagattctttccgatgcaggctggttccactggtcgggtatagcggcgtccctgtcacaggaaggagcagatacctgcctggaagcactacaaacagcagaccgtctagggttaactatctcgtgcgatttgaatttccgcaaaaaattatggaattacggtaaatccgcttcagaagtaatgctccctcttgtccaatatagtgatgtcatttttggtgcagaacccgaatacaaagaaattttcggcattcccccggtaggttttaaagctgtagacacctcatatccattagatttgtccggtttcaaagtattcggtcaaaaagtatcagaacaagcgctccgatgccagaaaatatttctggaattgcgtaataccatcacttccaatcacaatctgctggcagccatactttattctaaagggacattaaggcataccggtatttacgatattgtccatgaggtagaccgtgtaggtgcaggagatgcatttgtaggcggcatgatttatggtttgctgacctactccgacaatgaccaaaaaacattagaattcgcccttgccgcatctgcattaaaaaataccatatatggagatttcaatcaagtaacagtagaagaagtggaaggattaatgcaaggaaacacttcaggaagagtagtcagataactattttcatgattatagccaaacagaattgatctgcaaaatgtagcgtaaaaaagcaagtttacttcatggggcaagcaagctaagttacttatccaatgtacttaagtttatttttgaagccacagaagattcatctatcctttttccacaaatcaattccattcagtcattataaaaagaggaggattctcatgatatgagcatcctcctctttttatttatttcttaaaagaaactttctttttatgcctttgtttcttccggcatcttgttgcccatagtcaggtaagcgataggagcagcaatgaagatagaagacaacgtaccgatcacaacgcccaaaatcattgcaaaagcgaagctgcggatactgtcaccacccagcacaaagatacacaacaatacgattaatgtacttaatgaagtattgatggtacgagccaaagtagtattcagtgaatcgttaaacaactgcatacggttacgtttcggatacagaccgaagaactcacggatacggtcaaagataaccaccttgtcattgatagaataaccgatagcggtcaaaacggcaccaatgaaggtctggtcaatttccaatgagaacggaacccatccataacataatgagtatgcaccgataatcagaatagtatcgacagccaatgcaacagtcgcacccacactataagctacattgcggaaacgcagcaagatatacaaaccgatagccaccagtgcaaacaatacagaccaaatagccgatgtcttgatatcatcagcgatactgggacctactttctgagaactgataatagaaccaccgacacgattatcacgatcaataaagatttccaatgtagtaccttcgcccagcaagttaccatctttcaaagactgatacaagaactcttcaatttcggagtcgatagtaggagactcttcattaatacggtagttggttgtaatacggattgtcttcttatccgtacccaaggcgatagcctgtacattatcttctgtgattttcttcttcaacaagtcacgcactgtttcaggttcaacctgctgttcaaactgaactacgaagttacgtccaccggtaaagtcaatactctgcgccaaaccacggataaagaatgaaatgatacagataacgataatcgctccgaataccgtgaatgaacgtttcatcattcccataaagttgtaattcacgttctgcatcaggttcttggaaatccctgtagtgaatgtcaagttcaaccacttgtctttattcatgaagtgctcataaacaatacgagtcaagaatactgctgtaaagaatgagcagaggataccgataatcaacgtagtggcaaaaccacggatcggccccgtaccgaaatagaacagaatgataccagtgataattgatgtcaagtttgagtcaaaaatagcagagaatgcgttagaataaccgtctgctaaagcagccttaacagttttaccggctctcaattcttcttttgtacgttcataaatcaacacgttagcatctacagccatacccaatgacaacaccataccggcaataccagacatggtcagtgcagcttggaacgaggtaaggattcctaatgtgaagaagaagttaacaaccaatgcgcagttggcaaccatacccggaatcaatccgtacatagcgcacatatagatcatcaacagaatcaacgcaacaacaaatgaaatgataccttgattgatagattcctgacccaatgacggaccaacgatatcctcctgaacgatacgtgcaggagcaggcatcttaccagacttcaatacgttagccaagtcttttgtcacctccggagtaaagttaccggtaatctgagagtgtccgcccgtaatttcaccgtttacattcggagcgctgtatacgtaaccatccagtacgatagcgatagccttgcctacattgttctttgtcagaacagcccagcggcgcgcgccgtcagtgttcatagacatactgacacaaggcttgttgaactggtcatattcatctttagcatcagtgatcacatcaccttccaacggagcacgtccgttacgttcagtagacttgatagcatacaattcaaagatacgtccctgcttgtcaaaatcagcagcctttacaccccatttcaaacgaagatctttcggcaacatttctttcacttctttcatagcaaggtactggtttacctgagcagtatctttataatcggcataacctaccaccgacccgtaaccattcggatttaattgaagaacagaagccaacggatgttctttcttcatctgctccattgcggcagagttacttgccgtttcgcctttcaatgcggctgcaagactgtcggcagcagaaattgcagaagcctgtgcaacagcaacagtatcagctgctacagaatcagcagaagcagcaccactttcaacagcaagaatatcacgcagtctgttatctacagaagaaagataaggaactatttcttttgcgtcgaaagtttcccagaattccaagttagcagatccctgcaacagttttctgacacgttccggttctttgatacccggtagttccaccatgatacggcccatctttccttccaatgcctgaatgttaggctgtgccacaccaaaacggtcaatacgtgtacgtaatacattataagagttgtcgatagcagcctttacctcttcgcgcaatactttttcaacttcactgtcggaactgcgggtggttactttgtctttcaactgctgagtagcaaataattcagccaatttgccattgggagcttgtttcttatactcttttacaaaaagagtgataaagtcatcctgactagtgatagattgttttgatgcttctgcaaccgctttgttaaaagcttcatcagtcttgttgtcagccaaagccttcactacatccggtacagaaacttcaaggataacgttcataccacctttcaggtctagacccagaccaatctccatctcgcgacactgtttcagcgtataactacccaaataaactttttcattctgcatagaatcaaggtaatgtgcttcacctttcgggtcctgtgccgctttgtccatgtgatagcgggtcacaaaagagaaagaaagataaaacacacatacaagggtgagtaataccgcaaaaacctttacaaatcctttgttttgcatgttactttgaaatttattatttttactttttgattaattcttagtttatacaaggttgcaaatatagtttttttttcacattcccacggtatcaaacacaaatatttagattccaaaagagaaaaaaggctgcaaaagcattttttgcagcctaaattattctatctcacagcctattttatttcaaacccctatttttaagcaagggctccaagctgggatcagccccacgaaaacctctgtaaagggtcataggatcttccgttccacctttctctagaatatttttacggaaagagtctgcggtatttttatcgaacactccatgttctttaaacgcttcaaaagcatccgtgtcaagaacttctgcccatagatagctgtaatacccagcagcatatccacctataatatgactaaaataagtggcgcgataccgaggagctatttcaggaatcagccccagcttgtccatcgtttctttttcaaaagcaacgacattcagattttctgtatcagtcaggttatgcagttccatatcaagcaaagcggctgccaataattccgtagtcataaaaccttgattaaaagtaccctgattttggattttcgtaatcaactcatccggaatcacttctcttgtttcataatgcttggcatagagtttcagcacttcaggttctacagcccagtgttccataatctgtgaaggaagttctacaaaatcctgcgccacactggtaccagacactcctttgtagttacatttggtcagcataccgtgcaatgcatgtccaaactcatgaaacatggtttccacctcatccaaagtcagtaaagaaggcatatttcctgcaggtttagtaaaacttgccacattataaattaaaggacgtacttcaccggcctgttcacgaaaattactcatccatgcgccaccacgcttacctgcgcgtggaaagtaatctgcatagaacaatcccaaaaatgagccatcggcatcctttacttcatacactttcacatcagactcatatacgggcacatcattcagttcggtcaatgtaatgccatacaatttgttggccacggtatacaatccgctacgcacatcttccaaactgaaatagggcttgatttcatcttcattcaaatcatacttttcctgacgcaatttttcggcataataccaccagtcccatgcagccagcttctctcccttaccttccttatccattattttctgcaactcggcggcctctttctttgcattttccagtgagtatccccacaggttattcaagaaatccatgactgtctgcgaattcttagccatgttctcatccagtacaaaattggaataacaatcgaatcctaataattttgcctgttccaaacgcaatgccatgatctttcccaatatctctttattgtcattcgcatcatcatgattcccccggttgatataagcttcataaatattttttcttagctcacggttttcagcatattgcaaaaaaggcaagcgactggagttttgcaaagtgaatagccatttcccttcttttccagcagctttcgcttcctctgcggcccccgctttcacccattcgggtaacccggccaaatcagcctcattctcgataaccaactgataagcgttattctcatttaagatatgattgtcgaaagcaatccccaaagtcgacaattctttattgatctccctcaaacgggattgttttccggcatccagtccggcacccgaacggacaaaagctttataatacttgtccaacagccggtgttgctcagtcgtaagagttatcttaccttccttttcctgttgatgcacatcagccacccgtttatacaaatcctgattcaaataaatattatcactatgttctgaaagtacaggagccatcttttcattcaaggccgtcaacgaatcatttgtatccgcttcggtcaatgcaaaaaacaccccacttactctcgccagaatcccgccacttttatccagcgccacaatggtattttcaaaagtaggttcctcgggattatcaactattgccttaatttccgcattctgctcctctattcctttcaagaaagcaggctcataatgctccagtctgatcttagtaaaatcgggagcaccgtactcggtctggaattccgtaaagaacggattcatttctgttttctgttcacatgcacacattacacaacacgtcgctaacgtaaataatagtcttttcataatctgtcaattaaaggtatgtaaaatcacttctccgccacataacaccaaatggggtaatgatccgaactctttatcgtattatccaccgtacaacggtaagattttaaattcttgctcaataaaatattgtctattctgaaataaaaatgattttgattataagatatgccaaagccgtttcccgactccacaaaagcatcattcaggccttcccctaccaccctgtgagtgtatgatataggagaatcattgaagtcaccgcatacaattatgcctccccctttgtaaccggccaccaaacgagctatggaatcagcctgaacggcacgtatagccgatgcttccgccagttttctgatcagcaaacgagacccttgcgataccttttgcttatcagggtccttcatcatttcgcgatagacttctttatccttctcagtcagcttattggattccagatgattattaacaaccagcaaggtatcaccattcactttgattttataagcaatggaaccattgttaaggctggcatatctcaccggatgtgccgacaaaataggaaaacgggaataacaacccaaaccgttagcccccgatatcttataataatttttataaggataatctcttaaagcataatccacctctttcttggttaaccgtccccctacaatatattcctgcaggcagattatatccgcattgctgtttcttaaatattccaacacagggttcggattatccttggtgttcgcacggttcttctcaaaggccatcgtattgtaggataagaatttgattgccccttccggtacatcagatacaaatacattgactggaaaataagtacggatagcaccaatggaacataccaagcctaaaaatgaaagcaacgcatatttacgataaatcaccaaccaaaagaccagaaacaaaagattaacaatcaaaaaagcaggaaaagccaaaccggcacatgaccataccggatgagccacaggatcaatataagggctgtaagcacataccagtaacaataccaccatacacaagtttatgcccagtagtatccatcccaaaaaacgaccaatatatttcatatatcacttcttgctcgcatcaaacaagcttttcttctcttcggtagtcagactgttataaccagatttctttaatttatccaatatacggtctatctcctcactttgctgttttttacgggcattataatcgtaatcttttgccttatcaccataatgaactttcatcttcggctttttcgattgacgacgaaacgaaaggccttctgagaagcaatccaagcatcggtttatccatgacgtagcatcatgtccgcgggacaatccggaagcaaaccaccatccggccagagcacctcctaaatgagcgatatggccaccggcattgcccgatgtcataaacagcaaatcggtcacaaccataaacaaagccacatacttcaacctaacagtcccaataaacataaagtttactctatattccggtgcacgtaccgcagtagctacaacaatagcaagtacggaagctgatgctcccaacaaataagaataatacaaagaatcactgaaataaggaaaaacattgtaagcgatcatatacaacaaaccgccacaaatacctcccaacagatagagtccgcggaaatgctttgccgagaaaagagacagaaacatctgcccgaaccaataaagccacagcatattaaacagcaaatgcaaaatgcctgcatgcatgaacatataagtcagcaaagaccaaggctgcttgacaaactgcaacgtccaggccggcagttccaaatattgaagcacaaatgctccattccggttgaacagcatccataaaatccccaataaggaagttacaatgaatacccctacattaatatatataaactggatatatatgttccctttgttgaagctatttttcaaatcagtaataaaactgcccattattattcttttttctccaatacattattaatataaaaccaaaaatcatacctcccaagtgtgcaaagtgggcaacgccatcggtcgaagcacccaatcccaaaaatatctccaaagcagcatatcccatcacaaaatatttagccttgacaggaaatgggatagggaatacaaacatctgactattggggaatagcataccgaatgccaacaaaatgccatatatcgctcccgaagcgccaactgtagtcatcagattcaagtactccgccatcggaatcacggcaatccccgtattcacactgtcatattgcgataattcggtcacatattgtatatattgcaccagctcctgcaccaatcccgcacctataccacataccatataatagaacaagaaacgtttcggtccccaaacctgttcaagcgtacgtccaaacatccacaaggcaaacatgttaaaaaagatatgctggaaaccgccatgcataaacatataagtaatcaactgggcaggattaaaatcagatgccataaaaaagtgtagtcccagcaggtcgtttaggttaattccatacttcatggctaccacgcctccaaagaaacacaacacatttattatcaataaattcttggttactgtaggtatactgttcataaatattcttcgtctaataaaacattgattgcgcgcaaatttacaattttattctgttatataacagaaaacaagagttctcttacgtttttttgatttttggagcatcttttttaggctatctgtttgatttctaattttgaaagcatatatttgtcactgattttggtaaaacttttgtgttacatttaataattaatcattttcgttatgaataaggcagatcttatcagcgcagtcgccgctgaagccggcttgagcaaagtcgacgcaaaaaaagcagttgaagctttcgtttcaactgtaacaaaggccctcaaagaaggggacaaagtatcattaatcggattcggaacattctctgttgctgaaagaagtgcaagaacaggtatcaacccatccacaaaagcaacgattactattcctgctaaaaaagtaaccaagttcaaaccaggtgctgaactagcagacgcaattaaataattgctattttacataaaaggacttaaggaaaggggcgccggtactagcgccctttcttcttcatttttctatttgaacctatgaaacctaaaatgacaaccttatttaaatgcctgattggcgccgctgtatgcgctttttcaacacaagttcttcatgcagaagatacaaaactaccttattggaaagatattcagaccgtagccgtcaacaaggaatatccgcgtacagctttcatgacttatgacaaccgggaccaggcactgaccggcgagtatgaaaacagcccttattacaaactactaaacggtacatggaacttttattatgcagatacatacaaagatctgcctgccaacattgagcaaccggatgccaacatagcctggaaggagattaaagtacccggcaactgggaggtacagggctacggagtggccatctacaccaatcatggatacgaattcaagcccagaaatccacaaccgccgcaattacccgaagccaatccggtcggtgtgtatcagcgtgatatcgaaattcccgccgattgggatggacgcgacatattcctccgtttggaaggagcaaaatccggtgtatacgtgtatgtcaacggacaggaagtgggatacagcgaagactccaagaatccggcagaatttttaatcaacaactacctgaaacccggtaaaaactcgctggtcattaaaatattccgctggagtaccggttcttatctggaatgccaggatttttggcgcatgagcggtattgaacgtgatgtatttctgttctcacaacccaaaactcacatcaaagatttcaacgtgatgtctacgctggacgacacctataaaaatggtatcttcaaactggatgtagacgtaaccaaccatacagcaggcaacaaagaggtaaccgtagcatacgaattgctggatgccgcaaagaaagtggtggcagaaggtaacaccccctgtcctgttacagcggacgggcagaagagtatctcttttgaagccaccctcagcaacgtcaagacctggacatcagaacaccctaacctgtaccggttactgatatctctgaaagacggagaaaaaacaagcgagatcattccttatacggtaggtttccgccgtttcgagatcaaaccaaccgatcagataaccgaaaacggcaaaccatacatttgcttgttcatcaacggacaacccatcaagctgaaaggcgtaaacatacacgagcataatcccgaaacaggacattatgttcccgaagagctgatgcgcaaggacttcaccctgatgaaacagaacaacatcaacagtgtacgtctctgccactatccgcaagaccgcaagttctatgaattgtgtgatgaatatggtatctatgtatatgatgaagccaatatcgaaagccacggtatgtattacaacttaagccgaggcggaacattgggcaaccatcccgaatggctgaagccgcacatggaccgtaccattaatatgtacgagcgtaacaaaaaccatccctctgtagccatttggtcattaggaaacgaagctggaaacggttataatttctatcagacctatttatggctgaaagaacgcgaagtaaaagggatgaaccgtcctgtaaattatgaacgcgccctttgggaatggaacacagatatgtatgtaccccaataccctagtgccgcctggctggaagaaataggcaaaaaaggcagcgaccgtcccattgcgccatccgaatattcacacgctatgggcaattccaatggtaatctagcagcacaatggagagcgatctacaagtacccgaacttgcaaggtggttacatttgggactgggtagaccaaggtattctggaaaaagacgaaaatggacgtacctactggacctacggaggtgattacgggaccaatgcacccagcgacggaaacttcctatgcaatggaatcgtagctccggaccgcactccgcatccggccatgacagaagtgaaatatgcacatcagaatgtaggttttgaagccatcgacccggctgccggcaaattcctggtaaagaaccgtttctacttcaccaacttgaagaagtatatgatcagttataccgtaaaggcaaacggaaaaacaattaaaggcggaaaagtatcattagatatcgaaccgcaaagctccaaagaactggacatcaacctcaacggattgaagcccaaggccggcacagaatattttgtaaattttgtagttaccaccacagagccggaacccttgattcctgcagggcacgatattgcttccgaacaattccgcctgcccatagaaccattggctatagccgaacataaagcaagcggtaagactaccgtcagcacggatggtgacgtcatcaccgtattatcatcacgtatgcagttcgttttcaacaagaaaagtggactcgtgacttcatacaaagtaaacggtacagaatatttcgctgaaggctttggtattcagcctaacttctggcgcgcaccgacagacaatgattatggtaacggtgggcctaagcgcgaacaaatctggaagcagtccagcaagaacttcaatgtagcggatgttaccacagaaacagacggcaacaagactatattaacagccaactatttactggcagcaggtaacctgtatatcatgaaatataccatttatcctgacggaatggttcatgcagatattacctttacttctacggatatgaaagccgccagtaccgaagtgtcagaagcaactctgatggccaccttcacaccgggacaggatgcccagcgtctggcctcttccaaactgaacgtaccacgtatcggcgtacgtttccgcttgccatcggatatgaatcaggtagaatatttcggccgcggaccgggtgaaaactacatcgaccgtaatgcaagtagtttcgtcgacctctaccgcaccacagccgaccagatgtacaccaacaactacgtccgtccgcaagaaaacggacaccgtaccgacacccgttgggtggaactgagccgtaaaggcggaaaaggtctgttaatacgcgctgacagtaccatcggtttcaatgcactgcgcaattctgtagaggactttgattcggaagaagccattaaccgtcctcgccagtggactaatttcacccccgaagagattgccaaccacgacgaggcaaaggctaaaaatgtaatacgccgcatgacccacgtcaacgatatcactccacgtaatttcgttgaagtatgtattgatatgaaacagcaaggtgtagccggttatgacagctggggagaccgcccgctgccggaacataccctgcccgccaataaggaatatcattggggattcacattgatgccgataaaataaaaatatcgcaagcattccttccttaataagaagagtgtgtcagaactccgatggcgctatcatatagattgtcatcggagtttcatttcccatcctacatttcaattatagcctgaaagcaagatcagtctgatttatatttgctagctttgtaccccaaaaatcgaacacatggaacaacaaggagaaatcatactctaccagccggatgaatcggtgaggatggaagtgcgcattgaagatgaaacagtgtggctgactcaggcacaaattgcagagttatttgagaccaaacgccaagctattaccaaacatcttaagaatatattccaaagcggcgagttgaacgaaaactcagtatgttccattttggaactaactgcctcggatggcaagtcatacaaaaccaaaacatacaatttggacgctatcatttctgtaggctatcgtgtcaacagcaaaaatgccactttgttccgccgttgggcaagccaagttttaaaagattatttattaaaaggtcatgtcatcaaccaacgcatcagcaaccttgaacaaagggtggatgcaaagtttctttcttatgatatgcaactgaccagattaaatgagaaagtagatttttttgtccgcacctctcttcctccggtcgaaggaattttctttgacggacagattttcgacgcatacgctttcgccacaaaccttatcaaatccgccaagaattcccttatcctgatagacaactatatagatgaaaacacacttctcatgctttccaaacgcacaacaggagtagatgccaccatctatacacaacgaatcacaccgcaacttcaactagaccttacccgacacaacaatcaatatcctcctataaacataagaacctaccgccaggcacatgaccgttttcttattatagaccgatccgacgtatatcacatcggagcctctttgaaagatttgggaaagaaactatttgccttctccaaaatggatatcccagcatctatcctcacaaaactgctataaagatgaaagaagcagaacccaataataaagtcctactaggcatgagcggaggaacagacagttccgtagccgcccttctattgcaggatgcaggatacgaggtaaccggcatcaccttccgtttttatgaaaaaggaaatgatacagagtatctggaggatgcccgcgctttatgtgaacgtctgggcatcccccatctcacatacgatgttcgtgacaccttccggaaaaccatcattgactatttcatcaacgaatatatggcaggtcataccccggttccctgtactttatgcaacaactacctgaaatggcctcttttgaagagaatatccgatgaaatggggatctatcacttcgctacaggacattatgtacgccgacgcctcatcaatggatactatcacatcactaccggtgccgacccggataaagaccaatcctttttcctatgggggctgccacaagaaatcctgcaacgtatgcttctccctatgggcaacctgactaaagcccgtgtccgtgagatcgcggcagagcgtggttttctgaaagccgcccataaacgggacagtctgggagtctgcttctgccccatggactaccgcacattcctgcataaggaattgcctgaaggaagtatcctaccgggtaaattcttcgatgaaatggggaattttatcgcacggcacaaaggttatcctttctataccatcggccagcggagaggattgggcatagatcttaaccgagctgtctttgtcaaagaaatcattccggcagaaaacaaagtcatactgagcgacttgaaagcactggaaaaaacagaaatgagactgaaagaatggcgcatcaccaatcccgctttattactaaataaggacgacatcatcgtcaaaatacgctatcggaaacaagcaaaccgctgcacagtaaccctgcaaccggataacaccctgcatgtacaactgcatgagccgctgacagccattgccccgggacaagcagccgctttttatagggatgatgtagtactgggtgggggcattatcatctaattccagacactttcaaatcatatttcggctctcttttttgctgcttcaagattttcttgataactttccgtcgtttttcaccttcaggtcgagaaaccggaaagtgaaaatagacatgtatccgaatcaaaccttaaatagatagagatgaaaagtagaaattatgcaggcatatccttacttgcctcattagccgcttgtaactctgcaacagcagaaaccgttcaaaaaaacagtacgcaagacccgaaaaagcccaatgttatcgttattctggcagatgacctgggatatggagatttaaaatgttacggagccaagaatgtagaaactccccatgttgacaaactggcatcggaaggcatccgttttactaatgcacatactgtagccgctaccagcaccccatcccgctactccttgctgacaggagaatatgcatggcgcagaccggatacggatattgccgcaggagatgtaaaaatgattatccgtcccgaacaatacaccatggcagatatgtttaaaagtgccggatatgctacagccgctatcggcaaatggcatctgggactaggagacaagacaggcggacaggattggaatgctcctttaccagccgctttgggtgacttaggctttgactatcactatatcatggccgctacagccgaccgtgtaccttgtgtatttatagaaaacggcaaggtagccaactatgatccgtccgatcctatagaagtgagttacaccaagaactttccgggagaaccgaccggaaaagataatcccgaactactgtataacctacatcccagcaacggacatgacatgtccatcgtcaatggcatcagccgcatcggatttatgaaagggggtggaaaggcactttggaaagatgagaacattgccgattccatcgccgttcatgccatcgattttatcaaacagcataaagacgagcctttctttatgtattttgcgaccaatgatgtacacgttccccgttttcctcatgaccgcttccgtggaaagaatcctatgggactacgcggagacgcaatcgcccaattcgactggacggtaggccagctgatggaaacattggaccaacttggactaactgaaaacacgctgattattctatccagcgacaatggtccggttgtagacgacggatataaggacaaggcagaagagctgttgaacggacatacaccttccggtccatggagagggaacaaatacagcgctttcgagggtggaacagccgttccggtcatcgtccgctggccacagaagataaaaaagacaggagactcggacgtattaatgtcacagattgactggctagcctctttaggagctttggtcaacgccagattacctaaaggcagcgctccggacagctatgaccgtttagggaatttgataggaaccgataagacagaccgcccatggattgtggaacaatccatgaaccacacgttgtccgtccgtaccaaagactggaaatacattgaaccgaatgatgatccgaccactttcatgaaggcagaaaaaatagagaccggaaacctgaacgttccccagttatatgaaatggaaaaggtgagcgaacaagagaatgtagcagaaaagtatcctaagaaagtatttgagttgcagacaattctgaggcaagtacgcaataagggaataaagatgtaaacaggactcatccaataagaggatatttcaaaagttcgaagtaactatcaaatgttccaccgtaggggcagacccatgagtccgcccctacaacataacgacaacaaaaatcacttttaacacatttacataaagtacaaaaacattccgtcacagcaactcactcattaccaaccactttctgtgtaatagtctttcaaatcctcctcaatcggtatgccggtggcgaaataaatctgcttcggggattctctcggacagaatgtaaaatcaccccctcgttacctcccggcaactcgtaggcatcataagaacctattctcatcttatcttcacctcactccatttgatatttcaccaaggtgaagcaattattccacctaggtgaaagcggctgttcacctaagtgaagctagctcttcaccttagtaaagcaacgaacgcacccgaacaaaaatacgccttatgacgctcccctgcaagggaacaaccgtagctatgacacaggaattagaacaaccgatatccgtcaaaccagatttggcagcagaaaatggcaaaccgtttcagggggatttagaatgtatttgcacaacatatcactgatttacagcaaaatgctgcgcataatccaagatgataatatacgtataatcaaaaaaaactcccttggtacaaccaagggaggcaggtatacatttcctttaaaagttccggatgcagttgggattataaagcagcccttcggctgctttatgtttctctatcctctgtgttagtatttaaaggaatgattcatcttttacttattacttgccttaacaaacttataaagcacgaaagtcttcggcgccatctctacattcagtacattaccctcaaccgtagcagcactttctttcggagtgatgacattcggatgctctaccgtgttatctttatccaaatcggcagactggagtgtgatgcatttaccttccacaagtttatcactcttcttcaacccgttgaaagtcaatgatactggctgtgtctgctccgaagtattggcaattttcacgatataagccttttcatccttatcccatacggcactggcaaacagaccatcctgtccttcctgaccactcacagcttttttatccatagtcaggggcaacacatgagtacctttgttatgagcataaagctgctgcacatagtaactacaagtacgaaccgagttcagattgtcaaaccagatcaaatccggacgccattgccatccttccacatgggcaaacaaaggcgcataagtagccatgtgcaccacatcagcattccgttccagtccggtcatgaacgcagcttccattaaagcagcgttaaaatggttccatttcttgcctttgccatggcaggcatattctccagcaaagaccttcggtcctttgcggtcgtaattgtcataacggttgccttgtgccaggaaccagctttcgggacgatagaaatgctcatccaccaaatccactttcagatttttcatttccggccataagtaatcaaagtctttaccttcagactgaggtcccgaactaccaacaatcttgatttcaggatgagccttacgaagcacctcgacaaactgtttcagacgttccggatattccggtccccattgttcgttaccaatgcccaagaatttcaagttaaagggagcagggtgtcccatatccgcacgaacttttccccaagtacttgtgacatcgccattagcaaactcaatcaggtctaatgcatcctgtatatacgaatcaagctttgacaggctgacctgctggtcggggtcattctgatactgacatatcaatccgcagttcaaaataggcagcggttcggcgcctatatcctccgacaactggaaatattcaaagaagcccagtccgtaggtctggaaataatcagggaagaaacgatgcttgaacgtataatgccagcggttttcattcaacgggcgattctctaccgcacctactgtttttttccattcgtaacgggtagcctcatccgtaccttctacaatacagccgccgggaaaacggaaaacaccgggtttgatatcatataaagcctgcaccaagtctttacgaagaccgttcttacgctctttccaagtatccacagggaaaagagaaacatgttccagatccaccgttcccgcactttcaaggaaaatacgaagatgagccttgggctccgttctcggcgatttcaatatcacctcatattgtttccaatccttcgaattcactatcagttcttttgactcaaaagcctgacgttcctccatcgtatcatttttgatcaattcaatacgaagtttctggttctcaccacgtgcccatacggaaaagcgatactcagccccttccttgacacctatgccgaaaaaaccttcgttttcaattcctgtgtgcttttccctgtgtccggaattacccagacggacgtaatgcggatttcgctcgaacggcccgtcgtccatcaaggtcacattgccgaaaatattccaacccataaaacgttgcgggaattcaaatgaacggttctttatcagttcggcatacaagcctccgtccgccccataattaatgtcctcaaagaacaaaccatacatggttggttgtatttccgcacctaatttattggtctgcacgaccatgttgtgcgcattctgtgcatgtagcgctactccggcagcaaatacccatgctgtgaatagagttctgtgtaatttcatgatagtaatattattgatttttattagtcaattctctttccccacacagaatgcccttgagcatccaggccggtaaaaagaatggtttctgtttcattttcccaatcgtgtccggcaaagataatcaaattgttaatatcttctgtggctgtttttatattaagaagttgttttttaacattaaaatcccaagttgcatctccaacactgccatctgcttccaaaacaacacgggcagataacgcctgctccccatttcgcaagtccccttcaccccacaatatttgtccagcttccagactacgtttcaaaggcggttcctgaatacggataatttcccactcacctaccaaatcttctttagtgaaagaacgtggagcagtacctgcatagcgttcgggagaaaccacaggccatccattcaccgtaaagaacacttcgcgcacatgcaaatccatcaactggttctggggggaaagccgtccctgatggaccataaaataacggccgtcaccggcatcaataagaccgcaatgagccgttcccgcccatcccggatgattttcgaagcggtaaggagctgtcaatataggaacattattcgttgtatcttttatatcctctccgtagaaatccacaaaaggtccttcgggagaaccggaataagcgacacgtacattataggtagtcatcagcggatcgtaggatgtaaacagataatatttgccaagttggggttgatacatgatttccggcgcttccaagttatctttccggtaattggcccggcgtgctatcaagtgcccataatcctccggctgcacagtcattcctgtttcgggattcagttccacacagtacagaccaccgaaataagagccatagtgcatccatcactttccggtttccggatcctcaaccacagaagggtctatggcattcatcgcatccccttctcctgtcttaaccacacaccctttctgtatccagggaccttcaggagaatccgactcagccataccgatataggatgtattcctgccgaatgccgaaacacaataatacaaacgataaataccctgataaggcatcagataaggagcccagatattagtcgccccttttccctccgcctgactatgaacccattctatagccggagcaggaatctcgggaaaagcccagcccacaaaatcccaatgtaccaagtcttttgatttgcgtacctggacaaaacccagaggcacattcttctctttcgcctctttccggttctcagcaaaaatagcatcggtagaatacagataataagtatctcctatttttttacaagccgggtcgtgtacattatatgttccccactgcttgtaattctccatagatgaaagagcggtataatcatcagcccaaggattgggagaagggacaggcacgaaagccgtaggtgcactgcatgatgccaatacccctacggccaacaggcctaaaccgaccaacctatttattattaaccttttcatgtccatgaataatctttgagggaaaaattgctgtttcatagtatttttttattatgtgaccatttgctaatgtactaatttgccaatgacatgcggcatataacgcagccaactgtcacattgactaattattattaatgcaaatataactgcaatcaaaagctcgccaggtggacaatatcgcttaaagggtggacatttgtgcagcagagggataaaaatgatttatttgtttttgaggaaaaacgaaaaggtatatctttgtataagtaacggtatattcttacgtcattaatgaacaacacactatgaaaaaacattgttttctattcgctctgttcatctttttatctagtctgtatatgcaagctgaaggaacagccggaaaatggtccgaacgttataatttcactgccattacgatggatgaaggactgcctcacaactttgtggatgatatattgaaagacagtcagggctttttatggatcgctacccgcggggaaggaatcgcccgttatgacggttatgaattcaccgccttccatatgggaaacacccgtatcaagctacgaagtaactttataaacaaactgtgtgaggataacttcaagcgtatttgggctgtcagtgaaatgggtattgacatactggatatacaaaccatgcagacagtacaagtcactgatatgaaagacaaacttatttcactgtgtaaccgcccctctcatcttattctccatagcaaagcgggaaatatttgggtttgttcggaaaacaatttattcaaaattacctttgacaaacaaggagatataaaacaaatcattaaaacatgcgaagtaccggcaggagaatccatccggactatttgtgaagtagaagactatctctggataaactacaaagacggtatctaccgcatcaaagaatcggctatggaagtacaggaacccacattcatttcatctgcccttcaattacccggtgtgtccatacaagtaatctgccggaaagaaaatgaaatttggattggcagcgcacaaggccttttccgatacaatatggatacggaactgatgaagcattatatgtatgatccgaatgacaatagttcgctttcccaaaactttatcacagacatagcagaaacaggagaacataccatgctggttgccaccctaaaaggtataaacctttataatgcgttgacagacaattttgagcggataaataaagataccggagaaggagaaatcgtacaaaacacattaaactgtgacttcgtaaactgtctgctgaccgatggtgatattatctgggtaggcaccgaagtgggaggtctgaacaagatgagccgccggatgctgttcgtacaaaactattatcatactcccgccattcccggaagtctttcccaaaatcccgtcaatgccatttatgaagacccgtcgggtgttttatgggtaggaaccgtagaaggaggtttgaaccggcgggctcccggcagcaacacttttgagcactatactaccgatgcacccgcccacctaagccataataccgtcagttgctttaccagcgataacgatggaagactttggatgggaacttggggaggaggcataggatggatagatatgaaaaatccgcagaacaaacaatttcaccacatagaaatacccgaatgcggagacttctcatggggatgggccggaagtatctgctatgaccacttgaataatgccatctgggtaggaaccagtatcaatatctatgtttacgatttgaaaacacaaacgctcaccgaaccattcaagggcatgaacctaggtggaattgaaggttgtacaggatactacatagataaggataaccacctgtggctgggacttacagaaggactttgccgaatagatttaagcagtttgaaaacccctagactgatttatcaactctggaggatcaagctagacgaaccggagtcaaagttaaaggaaagggtaacctacatcacccagtctaaagacggaaccctttggataggcagcaacggatatggtttctacaaatcctcaccaacagaaaacggagaatataccttccgctccttcaccaccgaagacggactgataaacaacagtgtccgctgcatatcggaagataaagaagggtatctttggattaccaccaccaacggactctcccgcttcaatcctaacaacaacagcttcttcaactatacccggaaagacgggctattatccaaccagttctattggaacgcaatatgccgtgccgccaatggagatttatatataggaagtaccaaaggactgtctgtggtcaagccggtcatagatataaacccgaaggaagctgttcccttggcgtttacccatgtccgtgtggcaaataaagagcgattgtacacaaacggtaccttacagttacacgaacgcgacaaatctctctatattgaatttgccgcattggattatgatgcatcgacatttgccaattattattaccgcttgaaaggatttgacgacaaatggataaaagtaccggccaacagacgacaagccgcctataccaatctgcgtcccggcaactatactttcgaactgcgttatgcacccgacggcaaacaatggctggaagaaatggcagaactccacattgccgtatcaccttatttctataaaaccatctggttcattctgtccatattggttcttctatctttccttatatataaggtattatcatggaggcttcgttcgttaaaagaacaacaagaaatactccacatcaaagtagaggaacgtacccgtgaactggaagaacagaaaaaactgctttccactcaggcaagcgagctctatcgtcaaaaccaactattaaaacagcaaaacgaaaaaataaccaaacaaaaagggcaactgatccaaatgtcaaaaaaggtgcaggaattgacggttgacaaactcgccttcttcaccaatatcacccatgaattccgtactccgttgacattaatcgtaggacctatagaaagagcattgaaactaagctacaatcctcaagtcattgaacaattacattttgtggagcgcaactcaaaatacctgctctcactggtcaaccaattaatggacttccgcaaagtagaatcagggaaaatggaaattgtccgcaacccgggcaattttgccaaattactcaatgaactactagtacccttcgacgcatatgcttccgaaagaggaataaccatcgaacgtcgcttccgccttccttcatgtgaaataatgtacgatgaggatgccatgcataaagtgattgtcaatttaataggaaatgctttgaaatttacccccaaaggaggacaaattaccatctatgccacccccctccgccaggaagagcaggaaaagttattcatctgtattcgggatacaggaccaggacttcccgaagaagagatagacaaagtattcaaccgcttctaccaatcacaaaataagacgcattcctctatcaacggacaaagcgggactggaatcggtctctatctatgcaaacgaattgtccagttgcatggaggttcaatttgtgccaagaataatcagagcaaaggatgttctttccgtattttacttcctttgcaatatgccgatgcggacagtctgcccacaccaacagagcaagttaaagaaccggtcgactctccgatgacattgcaacctgccaccaatggaaaactgacgattctggtagtagaagacaacaaagatatgcgcgactatatccgttccattctgaccgaatattataacgtacttgaagcatcccaaggtgaagaagcattgactgtgctccaatcccaaaacgtggattttattgttagcgacctgatgatgcctgtcatggatggcatggaactgtcccgccgggtaaaatccaatttcgccatctcacatatccccttcctgatgctcacagccaaaacatccaacgaatcgcgcattgaaagtttccgtataggtgtagacgagtaccttttaaaaccatttgatgacactttgctgctggcccggatatccaatatactggaaaaccgcaaacgtttccaacaaaagttctcatacagcatggatgtggatgcactgaacatcgaaaaagaatccagtgacaagaagttcctggacaaagcaatgcagattgtgaaagaaaactataagaactcttattacgaaataagcgatttcatcgaagcaatgggggtaagcaaaagtttgatgaacaaaaaaatgcaaaatctgacgggacagtctgccggacaattcatgcgtaactaccgactgaatattgcgcgagaacttattcttcgtaaccggctgacacacaacatgaacatctctgaaatagcatacgaagtgggattcaatgatcccaaatacttcacacgctgttttacaaaacatttcggaacaacacccagttcgatgatggagaatggaaccgactgacttattccagagcgtaaaatgaacggattgtataccataaatgctccgtttttctacgctctcgtttcgctaaataaattatctttgccctacattataatagcacctaagttcaagcggataatgcaacaggagtgagaatgatgacaatgagaagatacgaaaagaataatttttcagaggaacagagaaagaagatttctttcccttttgttcccctgtggaaaagttgtttctttgcatcttccagttccccaacattcagttgcaatatgaaacagctaaccgaagaacaaaggtataacatttccgcttatctgcaaagcggaaagtcaagaaccgagattgccaatcttgtaggagttcatcgtagcactataagtcgtgaattacgtcgtaatagtgataaacgtaatggcatttacaaaccggatctcgctcaggctaagtatatgtccagaatgcgttcacgaaagcacttcgtgaagtttacggacgacttgaaaattcaagtagatatactcataaagaaagatttcagtccagaacaagtgactgggtttatgcgaacaaagggcttggaaacagtttctcatgagacaatctaccagtatatttgggaagataaaaagcatggagataagttgttatacaagcatttaagaagacggggaagaagtcataagaagagaggtgcattgactaatggacgtggttttatcaaaaaccgcgtggacatagacaagcgtcctacgatagtagacaagaaagtacgttttggtgatttggaaattgacacagtcattggaatgaatcacaaaggagcactattaactataaacgacagggtaactggactagtatggataagactacttagcgggaaagatgccagcccgctaactaaagctgccatcgatgccttggaaccttttagagaccaaatacatacaataacggcagataatggaaaagaatttagttttcacgaagaaattgcacgtaaactaaatatttttgtttactttgcaaaaccataccactcgtgggaaagaggagccaatgaaaacagcaatggtttgattaggcaatacttcccgaagggtacggactttagggacataaccaatgaacaggtaatgcgcgttcaaaacatcttaaactcaagaccgagaaaaagattgggttacatgaccccaaaggaaaaatataaattattaactaacaatgaattcgacactgttgcattgtctgtttgaattcagggcatatttaatacccatgaaaaaacaatttatgacttggctgcttgccatcactacaatgtcagcttttgctcaacaagctacagttacaggacccgactcctttttaagagtgaatgtatccgtaaaacaaggcatccccgtttattccgttacctataaggacaagaccatcctggaagattcacctttaggtttcattaccaatgtgggggacttcagccgggatatgactttcaccggacaaaaagaaaacaaaatagataaaacttatacacaagaccgtatcaagcaatcacaaatacattaccaagccaatgaacttacatgcacctttaccaataaagaaaagaaaaatataaatataatattccgcgtaagcaacaacgatattgctttccgctacgaaatgcccaaatatggcgatacaggaagcatagtgatagaaaaagaaacgacaggttttgacttcccatccttcaccactactttcctgtgcccgcaaagtgacgccatgataggttggaaacgtaccaaacccagctatgaggaagaatataaggctgacgctcctatgaatgtacgttcacaatatgggcacggttacacatttccttgtctgttccatgtaggagaaaacggctgggcgcttctcagtgaaaccggagtagacagcagatactgcgcctcacacctgagcgatgccaccgccgacggactttataccatcgctttccccatgcccgaagaaaacaacggtaacggcacggcatctcccggccttgcattgcccggttccactccctggcgtactattactgtaggcgaaaacctgaaaccgattgtagaaacaacgattccatgggatgtcgtggaacctctctacccaacggagcatacatacaaaatgggacgcggaacctggagctggatactttggcaggatggaagcatcaatttcgacgatcagaaaaaatatgtagatctcgccgccgccatgggatatgaatatgtattgatagacaactggtgggataccaacatcggccgtgaacgtatgaaagacttcatagactatgcacacagcaagaaggttgatgtatttttatggtatagttccagcggctactggaatgatatagtgcaaggtcctaccaactatatggacaatcccattatccgtaaaaaggaaatgaaatggctacatcatataggagtaaaagggatcaaagtagatttcttcggaggtgacaagcaggaaaccatgcgtctgtacgaagccatcctgagcgatgcggatgatcatggactgatggtcattttccacggctgtacccttcctcgcggatgggagcgtatgtatcctaattatgtaggaagtgaagccgtgctcgcatcggaaaacctgattttccaacaacatttttgcgatgaagaagcatttaatgcctgtctgcatccatttatccgcaacaccatcggttgcatggagttcggcggtacatttctcaacaaacgcttgaaccgcaacaatgatggcggaagcatacgcaagaccactgatgtattccaactggcaacagccgttttattccaaaatcctattcagaattttgcgttggcgcctaataacctgaccgatgcccctcaagtttgtttggatttcatgaagcaagttcccaccacatgggacgaaacaagattcattgacggctatccgggcaaatacgtagtactggcacgccggcatgccgatcaatggtatatagccggaatcaatgcacaaaaagaaccgctgaaattaaagttgaaccttcccatgtgtactaaaggagataaagtgatgctttatcaggacgataaaaaactaaatcctcatgctgaagagataacattaaaaaagaatgatgaagtcagcattacgatgcaggcggaaggaggatttttacttgtgaaataattcctttcagagaattgtattttatccctcatgtagccggacagtccttcatcaggttgtccggctacatgattttttataaaaaagccttctcctgagcctatctcaccgcctccaaaagacataaactataagcgaaataaatacattttttcccattattcattcgtccaccctataaaaccgtttgtccacccctgtttacggcataaattttacttttgtcatgcaatcggtactcaactttcggaagagacccctgcttttaaaatttaatcctaatcttaaatattatgaagaatagctccagcatatttataaactctgtggtttgtctacctagagtattcaacattggattgtacaataatccaacatctcaattcaatatatcagcaacaatttaatctactaatttaatacttaaaaaaatgaggaaacatttattattttccgtaatgcttagtctgtgtgctatgggtggcatgatggtgtattccacacctgttatggctaccgtggcacaatctccgactatcaaggttcgcggtcaagttatcgatgaacaaggtgaacccctcacaggagctaccgtcagaatcaaagacggacaaggcggaaccattaccgatgtggacggaaacttccaattggaggttgccggtaacgctatcctttcgataagctatgtaggctacaaggatcgtgaagtagctgttcgcaatcgcgccatcattgaatccatccaattgcaacccgacaatcagatgcttgagcaggtagttgtcatcggttatggtacacagaagaaatccgacttgactggttccgtagccgtagtagatgcggaagccctgaaacagacatcccattccaatatctccaccatgctcgaaggtaaagtatcaggcgtacaagtcacctccgacggacagcccggtgccgaccctactgtccgcatccgtggtgtcggatctttcggtgacacttctcctctttatgttatcgatggtgttcctatgggtacttccatccgcgatttttcttcaaacgatattgaaaccatccagatcctaaaggacgcatcagccgctgccatctacggttcgcgcgccgccaacggtgtggtcatcatcactaccaaacgcggtcagaaagaccaaccgctgaaagtagactacaatggctacgtgggtatggactatatccccagtaatgtctatgatgtaatggatgccgaccaatacagccaatacatcggtcaggcatgtaccaactccaacactccgctgcccggcggttacaagctggacagtaccaccggaaaatatcatttccaggacaacaccaataccaactggtttaaagaagtattcaaaacaggtatccgtcagaatcacaatgtgaatctctccggtggtggcgcccacaacacctataatgtttcattagactactacaaccagaaaggaacactggaaggcgccggtcctaattacgaacgttacacggcacgtgtcaacaacacgatggacaccaaattcatcaagttccataccagccttgtctactctcactccgatcaagacaacatggggttgtcaaacgcttccgaatacgttcaaggtctgtatggcgacgtaaccaatgtgctgcgtggtactttgctgatgcagcccaccatcaaagcctatgacaactctacttgggtacttgacaatctggtaggtatcgccaataacttcaactatgactcttacggctatggtgtttactacgatactgtacatggtgacatttcggcttccaaccccttgctggtcaacaatctgctgaagcgcaacacccgcgtggaccgcttcgtaggaacagcttccgccgatgtggatctcctgaagatgattggcgttgacagcaagaatcacaagctcaactataaagtcaatctctcttacagcaaaacccattgcaaggacttcacctggattcccgcatgggtacagagcaatcgtgtctatctggccaagagcaacgaacgcctcaccaaggctagccgttcttatgccgatgctttgattgaaaacgtgctgacttatgatgccaccgtcggcaaacaccattttaacttggtagccggccagacttacgaagaagaaaacaccgacctgttgacaggctggggcgtcaacttcaccgagccttacttcctgcaacttcagaatgccgccaacacttatgccgaaagcttcgaatacaaacacaccatcctctcttacatcgggcgtatcaactacaactacgatgaccgttacctgttctcggcaaccgtgcgccgcgacggcagttcccgcttgtccaagaatatccgttggggtactttcccctccgtatctttaggatggcgttttgacaaggaaacttttttccccttcaacagaaacattgtcaacatgttcaaggtacgcgccagctatggtgaactcggtaacgaaaacatcggtgaatacatgtatcaggctgtaatggcacgtaacaacatgacttatagctttggtaacacacccatcaccggttctgccatttctactttcgtagacaataacctttcttgggaaaagaagaaaagctacaacgtaggtatcgacctcgccttcttcaacaaccgtttggaattcaccgctgaatggtacaaaaataccagtgaagacctgctgtatgccgttccagttcctgagcaagccggcgtatccaacaccactgtaacgatgaacgccgcctcgatgaataactcaggttttgaatttacgactacctaccgcaaccgcgaccacgacttcaaatatgaagtgtcagccaacttgagcaccatccgtaaccgcgtaacctcattgggcttcggtaccgattcatatatatccggtgcctacatcaccaacgtaggtgaagaaatcggtaagttctacggatgggtttatgacggcatcgcccgcacacaagccgacctggacaaccatgccacacaagaaggtgcccagattggtgactgcctctataaggacgtaagcggtcccgacggaaagcccgatggaaaggtggatgcctatgaccaagtagtactgggcagcggtatgcctaagatcaacttcggtttgaacgcccgctttgaatacaaacgtttcgatctgagcatcgctacgttcggtgcactcaactatcacgtaagcgatgatatccacaactctctgaactcctgctacggctggggcaacaaagatgtagccatgcttgacgcgaaccgtttcagtgaagacggcagtacctatctttccaacgtgccacgtacctatgttaccaacagtgccagcttggcctggaatgatctcttcagcgaccgcaaaattcagaacgcagcttattggaaaattgccaatatagaattgggctacaacttccccaacgaatggtttggcaaatacatatccgacgtacgtctctatgtgtcagcacagaatttacacacattcaccgggtacaaaggttataatgtagactatgcaggaggcaccttcacaccgggatataacttctgttcttatcctaccgcacgtaccttcatgtgtggtgttcatttcactttctaatcactaaaaacataacaatatgaaactcaataaatatgcattggctctcattttgggattaggcacattggcttcttgcaatgataatttggagctgttgaatcccaaccagcaaacctcaaatacattcggcttcaatgccgatgatttggaagagagcgttattgccgcctataaccatatccgtatggaaggttcttacgcccgtgtaggctacaccatcgacgtgtgtcgtggtgatgaagcatggaactcatcacaagtatggtatctgcctttcgatgacctgaatgcggaagtaacctcggacatcacgtggtggccctggcgcgaatggtactataccattaatgtatgtaattttgccatttcccgttgcgatgaagacaacagccaactttccgagaaaatgaaacgcatcaaaggacaagtactcttcctgcgtggcctgtcatactacaatctggttggttattaccagaacccacccctcatcacagattatgctacctattcttcattggatggactttataccggcaacagcacatacgatgccgtactcgaccaagtggaaagtgacttcaaagaagccatggaattgttaccttcacgagatcaaggtggtgaatgggaaaaaggacgtgccacctgcggtgccgcagccggctactatgcccgtgcgctcatgacacgccataaattcaaagatgcccttactgtgctgaaagacattatcggcaagaaatatggtacttatgaactgatggataactatggcgacaactttcgtgaaggtcctgcctatgagaacaacaaagaaagccttttcgaagtgcaattcctcgacttggaatcacaaggaaccgatgacgagtggactccggtgaacaccagtccgaatgccacccaaggttcggccatcgagagtaacttcgctcccggcaattatggtggttgggcagacatctcggcttccccgtggctctaccatctcttcaaagctgagcgtacaactgacgggaaactcgacccacgtctgtactggaccatcggtacttatgaatccgactgggaagatttcgagtttggtaatgtagcttatacgaacaaacttacagccactgacaacatcgtaaccaacaacacatacggtggtctgcccatcgccaagttcacaaaccttcgtaccggtctctatagcacggttattacaggtttgcacgatggaatcaacttgcgtctgatgcgttactccgatgtgctgctccgcgccgccgaatgtgaaaacgaagtcaacggccccacacaacaggccatcgactggattaacgaagtgcgcaaccgtgctgacttgcccgaccttgaactggctgacttccctacagccgacaaactcttcgagcagattgccaatgtggagcgtccgaaggaattcgggtgcgagttcggacgcggattcgaccttatccgctggggattcttctataaaaatgaccgtttgcaacaactcaaggaacacagcgtcgtacgccgttctttaatcggaaccaaggaccctgtaaactacaacgatatcgcaaccgatcccgaactgaaaagttctttcgacacctacttacccggacacgaattcctgcccatcgtacagcagttgttgaacaagaaccccaatttgagtggtaactccgcgaacttcagcacagacaactctacttatttcagtgaaaatggatggacagttcgtccggttgttgacttaagcaaataaacaaacctattaaaatttaagacaatgagaatactcagaaaattagtatacgtttgctgttccatcaccttggggttgatggcattgtcaagctgcgagggtggcgaattatatgatgtaaacgcccctgactggatctccgagaaagtggactctatagcagattcaaagaaagagccggaagaagaagtactggaaggtatgcaagaagatgtctactccttcggtaacacagactacacctccggtttctggacagctttctccaaatattacgtcgtgcccgacggccagaaatggcatggggtgttcaatctcaacatcaatcccgccgacaatacctattataaaaacttcgcccttgtcattaccaatgacgcagaccgcggagatgaaggatacgcggaatatggcgcttatcgttttgacaccacaaacgatactttggcctataactcccaatggggttcccatctttttttcaaatacacatccagcacgctgatgctgtcacccgttgataatctggacgaaactgtacagaaattgggcggcaaagtgacactcaccgtagaccgaaccagtgaaaatgccttctctatcaaaatccagaacacctcggcaaccaaaacctacaaacagccgtacaagttacccaatctgaatatagacaagagcaataccaacatccgctgtttcctagtacctgaaggctcttatatcaacttcttacaatcaaacatcattcctatcggtggccttacttctgccgaggacaagaatccgctctcgatggtactgcaaaatgtacccgatcaggtcaatgccggcacttcactcgaagaagccgtggtcggtattactgccgtcgtcagcttcgaagaaggggtgactaagaccgtaaccgccgaagaactccagttcaccgccatccccaatatggaagaactgggtacgaagacactagtagccatctataacaagaccttcaagggtgagaattgcaacttgccggtggtagccaatgctacgtttgaagtagtggaaaagattgtatccatccaagtgacggctcaacctacacatacacaatattactattatacttcggctgcaaccgaggcgatgacggatcgtacgctggcattccttccggaaggattgaaagtaacggctacttatgccgacggaagcacccaaattattgacaacacaaaactcagtttctctgccattgtcgccaaagccggtacacagaccgtaaccattactgccgatgaagctaccgctaccgtagcagttaaagtggccgaatcaacagtttccactgtcagcaactctgcagacattctgggaaccgaagacaatacaacggagtggtggactgtcttttctgacaatttcaacgtgccgaccggtgaaactaagtccatcagcttcaccaattacaccagcctggctaataactggagcaacttcgctgtcgttctccgcaaagccgatcttgccgaatatgcagtggtacgcgccgacaactatggatggggtgcaggatacgatggaaatgccagcctcgttcacaacggtacacaaggcgactgggctacttggcttgccgatatgaacggagccaaagtcaccgtctacgtgaccaattgcggcaatggtacaaccgacattcaggcggtaatggaaggcacttcaggtacctcctatgcccaatactatttagggatcaacaaagtagatatgaacgacttgaacttcgctttaacgattgaaggcggacatctcgtcttctaagccgaatcagtaatcacacaaaccatgccgttttcctcaggaaccagaagaagcggcatggcctttaaactatcaacagatgaaaaaactattatccttgtggatgttcttaccaatattccttgttttagccgcttgttctgacaacagcgaagatatagaccgctattatgcaactgtaagtactccgaaagtaactacaaccacacccacctcattgaccgtcaccgcgtcggttacgggtgatctgaaccaaatagtcaagaaaggcttctgttacagtacagcaacttccacaccgactatcaaagaccacgtggtgaatgccgatgagaatttcagcgccaccctctcaaccttgaccaccggtacctcttactatatccgtgcatacgtctactgtgacagccgctatgtctattctgaggtgatcacggccaccacagaaagcttaagcttagacgatgaactcaagaattatgtggcccccacctacgccgatgactatacctcgataagtgactggagcaaacgctctcaatggaatcttgccaacgtacacgacccctcggtggtattggccgaagatggttattattacatgtatcagacagatgcttcctatggaaacgcccacacggcaggcgggcacttccacagtcgtcgttccaaagaccttgtcaactgggaatacctcggcggtacaatgaagaacctgcccgaatgggtagtacctaagctcaatgaaatacgcaaagaaatgggacttgccgaagttaaccctaatattaatgacttcggctattgggctcccgtagtacgcaaggtaaagaacggcctctatcgcatgtactattccatcgtctgccctggcacactcaacggtgccaacacctggtcggagcgcgccttcatcggcctgatggaaaacaacgaccccgccaacaacaacggctgggtggacaaaggctacgtcatcaccaatgcttctgacaaaggacttaacttcaacataaagccaaatgactgggccaattgctactacaaatggaatgccatcgacccctcttacatcatcacgcccgaaggcgaacactggttggtctacggttcatggcatagcggcatagctgctctcaaactcaatggcgagacaggcaagcctgccgaaactttgggccagccttgggctacaggccaagcacctgctgagtatggtcagttaatcgccacccgccagacaggtaaccgctggcaagccagtgaaggtccagaaattatttaccgtgatggctactactacctcttcctggcctacgacgcccttgacgtgccctacaacacccgtgtagtccgttcgaagagcatcactggtccctacgtaggcattgacggcaaagacgtgaccgccggtgccgatgcactgcccatagtgacccatccctataaattcagcaaaggctacggctgggtaggcatcgcccactgtgctatcttcgatgatggcaaagacaactggttctacgtctcacaaggtcgcatgcctaaggatgttccgggcatcaacgccagtaacgccatcatgatgggacatctacgcagcatccgctggacgaaaaacggttggcctctcgtaatgcccgaacgttacggagccgttcccaaagtagccatcaccgaagaagaattgcccggcaattgggaacacatcgaccttacatacaaatatggagagcagagaacttcagcaacaatgaccctcgccgccgaccacactatcaccgaaggtacctggaaaggcagtatgtggagctatgacgccgaccaacagattctgactgttaacggagtggaactttatctgcaacgtgaaaccgattgggaagccaatccacgtacccataccatcgtctatgccggctatgccaacaacaagacgtattggggaaagaaatccaaataacattcccgctcccgcacgcaaacttcatatagaaacaggaccactgcccctcaaaacaacaccaatgtttatggggcagtggtcctgttttacaagtcaatagcagaaattaaagatcattaaacagatacaagagaaacctatttcatgaaaaggaaaaagagttaggttccctaatctccatacaaaaaatcattattttgttcttttacgttcaaagacaaccttttatcctaattcttacttttatttatcaccataaatctctattccttaaaccaacaaacatcatttgtagacaagcagaggacaccagcatcagattttttgttaattattagccaaatacacactttaatttataactttgcaattctaatagaatgaattatggaaaataaactaaccatttacaatacattaagccgtcaaaaggaacttttcgttcccttgcatgcccctcatgtaggtatgtatgtatgcggtcctaccgtatatggcgacgcccatttaggacacgcacgtcccgccatcacgttcgatatcctgttccgttatcttacccatctgggatacaaggtacgttatgtccgtaacattaccgatgtcggtcatctggaacacgatgcagacgaaggtgaagataaaatcgccaaaaaggcccgtttggaacaattggaacccatggaagtagtacaatattacctcaatcgctaccacaaggcaatggaagccttgaatgtacttccacccagtatcgagccacatgcatcaggtcatatcattgaacagatagagctggtagaagaaattctgaaaaacggctatgcttatgaaagtgaaggttccgtttatttcgatgtagcaaaatacaacaaagaccatcattacggcaaactgtccggccgtaacctggacgatgtgctgaacaccacccgcgaactggacggtcaaagcgagaagcgtaatcctgccgatttcgctctgtggaaatgtgcacaacccgaacatatcatgcgctggccaagcccgtggagtaacggttttcccggttggcattgtgaatgtaccgcaatgggcaaaaaatatttgggcgagcatttcgatattcatggagggggaatggacttaattttcccacaccacgaatgtgagatcgcacaaagcgtggcttcacaaggagatgacatggttcactattggatgcacaacaacatgattaccattaatgggcagaagatgggaaaatcatacggcaactttattaacttggatgagttctttcacggtactcacaagttactgacacaagcctacagccccatgaccatccgtttcttcatccttcaggcacattaccgcagtacagtggacttcagtaacgaagcattacaagcagccgaaaaaggattggaacgactgacagaagctgtaaaaggtcttgaacgcatcaccccaagcgcacaaaccaccggcatagaaggcgtaaaagacttacgtgaaaaatgctatacagccatgaacgatgacctgaactcaccgattgtcatcgcccatctgtttgacggcgcccgtatgatcaacacagtgcttgataaaaaagcgaccctttccgccgaagatctggaagagctgaaaagtgtgttccatctctttatgtatgaaatcctgggtataaaagaagaagccgccaataacgaggcacgtgaagaggcatatggcaaagtagtagatatgctgctggaacaacgtatgaaagccaaagccaataaagactgggctacaagtgataaaatccgtgatgagctagccgctcttggctttgaagtgaaagataccaaagatggtttcacatggagactgaataaatagaatacgtagagcggtactatattttttcaccacagactatacagattcacacagattatccaacctaacaatcaatgatttaagaagcatctgcgtttatttgtataatctgtggtgaacctttcagataaccatcaaaactgaaaaatctcccttcggatggtaatacttatttttaaataactatttttgcagaaattatacaaaactgcttatcacaccaatccaatgctagctgagaataagataactttagcgtccctgtataagattttgtttgaagaagagccactgacactctccgacccatgtatgcaaaaattggaagagagtttcaattttctaaaaacattctccaacgacaagatcatctatggcatcaataccggctttggaccgatggcccaataccgtattgaagatgaatccttgtcacaattacagtataatatcatccgcagccatgctaccggagcagggcaaccccttccggaactctatgtcaaagctgccatgatagcgcgtctctatacttttctgcaaggaaaatccggcgtacataaagaactggcgttgctcattaccgagtttatcaaccgggggattattccatacgtacccgaacacggcagtgtgggggccagtggtgatctggtacaactcgcccatatcgccctcactctgattggagaaggagaagtcttttaccaaggcacgaaaagagatacggcctctgtgctggcggaaaacggattgcaaccttttcaaatgcacatccgcgaagggctttcagtgaccaacggcacttcagtcatgacaggtataggtattgtcaatctgatttacgcacgccaacttatgcagtgggcggtaggtgcatctgttatgatgaatgaaatagccgcctcatacgatgacttcatgtctgaaccgctgaacggggccaaacagcatgaaggacaacaagagatagcccgcatgatgcgccaatgggtaaaaggcagcctgtgtgtacgcaaaagagagaatgaactttataatgggaagcacgaagagaagatcttcacccataaagtgcagccctattattcgctacgttgcattccacaaattctagggccggtttatgatgaattactcaatgctgaaaaagtattgataaacgaaataaattcagcttgtgacaacccgatagtggaccctgacacacagaatgtatatcatggtggtaacttccacggagattatgtatcttttgaaatggacaagttgaaaatagcagtcaccaaactgacgatgcttgccgaacggcagattaattacctgtttcacgaccgcatcaacggcattctccccccctttgtcaatatgggagtgctggggctgaattatggtttgcaggcctcccagttcacagccacctctaccacggcagaatgtcagactttgtccaatccgatgtatgtgcatagcatccccaacaacaatgacaaccaggacattgtaagcatgggtaccaattccgccttgatggcaaaaacagtcattgaaaatgcttatcaggtgatggctatcctgatgatgggtattgtacaagccattgattgcctggatatagccgaccggataagcccccggtcacaacaagtatataaagaaatacgagcatttttccctgttttccgggaagatacacctaaatataaagagatagaaagcatgatggtatatcttaaaaaagggaggtttcaagaaaaatgaaatacgcattagtaacaggaggaagccggggaatcggacgagccatttgtctgaaactggccgaaatgggatatcatatactgataaactaccaaagcaacaatacggaagctgaagccaccctgcaacaaatacgggaacaaggctcggatggcgaactgatgaaatttgacgtgacagatgcagcagccacacacgccgcactgaacggatggatggaacagcatcccgatacttacattgaggtactggtgaacaatgccggtatacgccgtgacaacctgatgctgtggatggaacaggaagaatggagccgggtactggatatcagcctgaacggtttctttaacgtcacccaacccttgctgaagaatatgctggtaaagcgattcggacgtattatcaatatcgtttccctgtcggggatcaaaggaatgccgggacaaacaaattattcggcagccaaaggtggaatcatagccgctaccaaagcgttggcgcaggaagttgccaaaaaacacgtgacggtaaatgccatagcaccgggatttatccgtacagatatgacagacggaattgatgagaacgagtggaaaaaacacatcccggcaggacgcttcggcgagcccggggaagtagccgcactggtaggcttcctggcatccgggcaagcttcctacattaccggagaagtgatttccatcaatggaggattatatacgtaagcaaaagatgaaaagagtagttattacaggaatgggcatctattcgtgcataggcaggaatcaagaggaagtgaaagagtcactgtttcaaggaaagtcaggcatcggaatcgctccggctcgcaaagaaatgggctatttctcggcgttaaccggtcttgtcgaacgtcccgatttgaagaaattattagaccgcaagaaacgccatagccttgccgagcagggagaatacgcctatatggctaccctggaagcattccggcaagcccggatagaagaaaagttcctgttggagaacgaagtcggaatactgtatggcaatgacagtagtgctgctccggttattcaagcaatagatattatccgcgagaaaaagaatacggcattggttggttccggttctattttccagtccatgaattccaccattaccatgaatctttcggttattttccatttaaaaggaattaacttcactatatcgggagcctgtgccagtggttcacacgccatcggcatggcttatctgcttatcaagtcaggacttcaggactgcattctgtgcggaggagcacaggaagtgaacccttattccgtgggtagtttcgacgggttgggagccttctccgcccgggaagacgaaccggaaaaagcatcccgtccattcgataaaaaccgtgacggactagtacctagcggcggaggcgccagtctggtgctggaaagttatgagtcagccgtaaagcgcggagcgactatcctggcagaagtcataggatacggcttttcatccaacggagatcacatttccgtacccaatgtggatggccccagacgctctttgcagatggcagtcaaggatgcgggtattcctttggaagagattgcatacatcaatgcacatgccacatccactcctgtaggtgatttgaacgaggcaaaagccatagcggaagtattcgggagccatcatccctacgtcacatccaccaaatcacagaccggacatgagatgtggatggcaggagccagtgaagtcatttactccactttgatgatgaacaacggattcatcgcacccaacctcaattttgaggagcccgatgaagcctctgccctgctgaatatcccttcccgaagggtagaaacggaatttgacacattcttgtccaactcattcggattcggaggaaccaattcctcactgattatccgcaaattcaaagaaaacaattaatttaaaccaatatataaatttatgaccaacgaagaaatcatcgaaaagatcagaaccaccctggccgaagaatttgagattgatgtagaattgattcagccggacgcccctttgatgcaaaccttggaattggatagccttgatttggtagatatggtagtactgattgacaggaatttcggtttcaccgtgacagccaaagactttgccggtatcaaaaccttccaggatttctataatctggtaatttcgcacatacaaaaagaagactgatgcccgaaacatggaaaggtaaaacaagaggaggtacattcggatacatgttcttcatctacatgattcgctgtctgggtatcactgcggcttacggctttctgtcattggtcgtcctctattttatacctttcgcaccgaaagctaccgccagtacctggcaatacgcacggaacagactgaaatacggacgtgccaaagccgccggactgttattgaaaaattactaccggctggggcagatattgattgacaaagtagccatcggcaatgggatggccgacaaatatcatttcgagttcgagaactatcaggcatttttgaacgtactgaatggaaacaccggcgtaattatgataggcgcccatgtaggtaattgggaaataggtgctcctttcttcgatgaatacggcaaaaaaatcaatattgtcatgtttgatgccgaacacgaacggataaaagagattctggaaaagaatgcctccacacgcgattataaaataattcccgtgaatgaagacaatctgacccatgtattccgtattacagaggcactggagcgcaaagaatatgtctgctttcaaggtgaccgctatctgaataaagagaaattactcagcagtccgttcatgggaaaagaagccgaatttccgatgggtcctttcctgctggcttccaaaatgagagtacctgtcgtattctattttgccatgcgtgaagcgaaaaaaaactatcgtttccatttctttattgccgaggcggtggtacataccaaagagaagcgggccgaacaagcattattggagcaatatacacaaacgctggaaaaaatcgtccggcagtatccggaacaatggttcaattactacccgttctgggcataaatacaaatctggattatgatgcataaaagatatacaaaagagcaattgacagctgtagaggcacaaagactggcgcaagagatcgctttcggtcccgtggtattccaagtttcacgtctgatgttgaaattcggaatattccaattgctggccgacaaacggaaaggatacacgctgcaagaaatcagtgtgcagaccggactgacacgctatgcagcacaagtattactggaagcatcgctgaccatcggaaccatcctgttggaagaagaccgctatgtactggccaaggcaggctggtttctgctgaatgataaaatggcacgtgtcaatatggaattcaatcacgatgtgaactatcaaggacttttctatctggaagaggctcttttaaatggtcagccggaaggattgaaagtattcggcggatggcctaccatttacgaaggactttcccaactgccggaacaggtacagaaaagctggtttggctttgaccatttctactcggacaactcgttcagccaggcattagaaattgtatttcttcactcaccgaaacgactgctcgatattggtggaaacaccggcagatgggcaacccgatgcgtccaatataatcaagaagtagaagtaaccattgtggatttgcctcaacaactggaaatgatgagaaaacaaactgccggtgtgcccggtgcagaacgcatccatggccacggcgccaatctgctggatcggaccgtgccctttccttcaggctttgacgccgtatggatgagccagtttctggactgcttttcggaagaggaagcaaccagtattctaagtcgtgtggcacagtccgccagcaaagacagtaaagtctacatcatggaaacgctgtgggaccggcagccatacgaaacgggctcttactgcctgactcaaatcagcctttacttcacagccatggccaacggcaacagcaagatgttccattcggatgacctgatccgctgtattaaaaatgccggactggaagtggaagagattcatgataacataggactgggacacagtatcctgcaatgcagactgaaatgaacagaaaagaaatcatttgtcggggagacgaactgttccggctgattccacaacatccgcccatggtcatgatagaccgtttctatgggatagaagaaaatacatcctggtcagggctgaccgtcacccccgataatctgttctgccgggacggcgtattacaggaaacaggaatcatagaacacatcgcccaatcagcagcggcacgggtaggatatatctatatgctgcgagaagagcctgtaccactaggctttatcggctctgtagaaaaaatgaaaatattccgtcttccttctgccggagcagaattatataccggaataaccattgtgcaggaaatattcgatatcacactgattaccgccgaggtgaaagaaaacgatgaacttctggccgaatgccggatgaaaatatatctgaaaaaagaatgaaacgaaaaacaagtccacagcaggcagcactgacagaccggaccaccatcaaggtccgcttcagtgaaatagattccatgcagatagtatggcatggtgaatatgtgcgttatttcgaagatggacgtgaagctttcggaaagcgatatggcttggactatatgagcatctaccgggaaggctatgtagttcctatcgtagacctgagctgccagttcaaacagtcgctgtcattcggtgaggaagccattgtcgagacacggtatattcatagtgatgctgccaaaatcctttttgaatacaccatctaccgggcatcagaccaaaacattgtggcaacaggaaccactacacaggtattcctgaatacaaatagagaactggaattggttaatcctgccttttacatagagtggaaaaagaaatggaacatcatctgactacctatatcacccatgataccctgatcagcgcgctgggtttcagcacacaggaaaatttggaagccatccgggcctaccacagtggcatcaccctgcagacggacaaacggattgcagacactcccctattggcagctactatctcgcaagagagattgcaacaacaggcagaaacagcaggaataagcgcatatacccggatggaacaactgtttatattgaccatcaacgacctcatccgtcagtccggacaaactttggaggataaaacctgcggactcatcctctctaccacaaaagggaacatcgacttactgacccgtcatacggaacatcccgatgaagcggtctttctttggaaaatggcagaaaacattgccggttatttccatgctgaggaacgggtacatgtcatctccaacgcctgcatatcaggagtgtcagcccttgtaacaggaaaacgcatgatagagaacggcatctaccgcaaagtaattgtagcgggaggtgaccttctctctcatttcatcaccagtggtttcctgtctttccggtccctcagctcccgtccatgccgtccgtatgacagcaaccgtgacggactgaacttgggagaagcttgcggagccgtattactaagtacggaaaagacgccaaacagcatcattctttccggaggagccataagtaatgacgccaaccatatctccggcccttcccgtacaggagacggactctttttcgctatccgccaagccatgcaggaggcaggaacagccctccaaaacatcagctttgtcaatgcccatggcacggccaccgtatacaatgacgaaatggaatccaaagccctcacgctggctcatctggaacaagttcccacacatagcttaaaaccctatttcgggcataccttgggagcatcgggaatcattgaaagcattgtctgtatgcacgaactgaaacaaggcatcctgttcggcactccgggttacgaaacaccgggtgtgcctatgcctataccggtctatgcgactcaccaacacattccgatgaaacattgtataaaaaccgcttcgggatttggtgggtgtaacgcagccattgtcttatctttaccggaatatgctccgttcaaggatgaggacaacaccttgcccgaaatccgatgtacacgggaggttcgtattgaaaacagttctgtcttcataaacaacgaacttatttttcattctgaagaaccggatttcggcatatttatacgtgatacctataaaaaatcaggcggaaacaatatgaaattctataaaatggatgacctttgcaaactgggatatgttgccgccgaatacttactgaaagacaagacattcgccccactggaaatggggatgttacttgccaacgccacttcatccctacatacggatatcagacaccagcaactgatagaccaggacggagaccgggcagccagtccggctgtatttgtttacacactacccaatgtagtgtccggcgagatttgcatccgccacaagatacaaggggaaaacacctttttcataactaaagcctatcagccggagaaactggaaagatacgcacgtatagtcatgcaaaaagggaaactgaactattgtatcatcggatggtgtgaattattgaaaaacacctatagagcagtatttaaactgattgaaaaacaataaaaaatatggaagaattgattgagaaattgaaagttgaattaatagaagcattgaatctggaagaaatcactccggaggacattgatagtgaagcacctttattcggagacgacggattgggtcttgactcgattgacgcattagagattatcctgattctggaaaggaattatggcattaaaatagagaatcctgccaaaggaaaggaaatattctattcggtgcgtaccctggcagactacatcaccgcccatcagaaatgaggaagatctatgtcaccggtctgggagtgatttcgggcataggacaaggagtaaaagaaaatctggactccttaaaatccggaaaacacggtatggggaaaatcacccttttccccaccgtgcttgacgtacccgtgtccgaagtgaaacaaagcaatgaagaattaaagcaaatcctgttccttccatccggcaaaacgtattcacgtacagccctgctaggcttgttggcagctcaagaggcagcccgtgatgcggaactcgatttcgcttctccccgtatcggactcatttcttccacttccatcggaggaatggatgcaagcgagcggttttatgcctctttccgggaggataaccgaaaaggaagattacgtgatattatctcccatgactgtggagccagtaccgaaatgatagccgcttatttaggagtgaaaggaatggtgaccaccctcagcaccgcctgttcttcggctgcaaatgccattatgttaggggcacgcctgattcgacacggttatctggacaccgtcctcgtaggtggaacggatgccttatgccgtttcacgctcaacggtttcaattcattgatgatactggacaaagagcactgccgtcctttcgaccgcacacgtgccggattaaacctcggagaaggagccggataccttgttcttcaatcggagaaatcccttacaaaggctccttattgtgaactcagcggttacgccaatgccaacgaagcctaccatcagacaggaagttcccccgatggaaacgggcctttcctttccatgagtcaggccatagcctctgccggactgacagccggagccatagactatatcaatgtacatggcacaggtactcccagtaacgacgcttccgaagggaaagccatccggcgtatcttcgatacccgtattccacctttcagttcggtcaaggctttcatcggtcacaccctgggagcctcggaaggaatagaagccgtatattccgtactctccatccgtcacggactgatttaccctaatctgaacttccatctgtccgatgaagaaagcggtctcattcctgaaacgattttccggtcgggacttcccatacggcatgtattatccaactccttcggattcggcggaaacaactcatctctcgtattttccactctaaacagatagcgtatgtgcccagtatatatcaatcgtatcgcctctattcatgcagagagcagcaatgaaaagccttatttctccgcacaggaacctgattataaagaaatgatcaccaacgccaatctgcggaggcgcatgagccgcatgatcaagatgggagtagcttgcggactggaatgtctgaaagatatatcgccggaaaaggtagatgccattatcaccgctacgggactgggttgtctggctgatacggaaaagtttatgaacgccttgatggataaccgggaacagatgctcaatcccaccgctttcattcagtccacctttaatacgatcggtgcacagatagctttgctactcaaaatacatgcttataatgtgacgtatgtacaccgtggtttaagttttgaaagtgctctgacagatggcatcatgagtattgccgaaggcaaacagcatgtactggcaggtggtatggatgaaataacccctaccagctacatcatccagcagcgtttaggactgttgaaaggaacgacagccggtgagggagcacaatttttcctgttaagcgcacaaaaagaggaacagacttttgctgaactgaaaggggtggacacttttatcacccggatgaatgctccggaaatcagtaacaggatgcatcattttctaaaatcgcacgagcttgcacccgaagacattgactggtttatcagtggcaagaacgggcaggaagcaacagatgccgtttatacagagctggaacacagtctgtttcctcatgccctgcatagcagctttaaagagcaatgcggagaatatcagactgcctcatcctatgctctctggatggcggcaaaagccttgaaagaagaagcttcatcccgttacgcattgatttataaccaatatcaaggtatcaatcactcaatcatcttaatcaaacgatgcacatcctagcttctgtaatcatcatagtaagcatcatggcctattaaaaagatgcttttaagatactgaaaacaggaataatgcttaactttatccctcataaaataaaagtagtaaaaataatgaagaaaataactgttacgaatattgatatatccatatctgtaagacctgataataatgattatatctgcctgacagacatggcacatttcaaagacagagaacgtactaactacattatacaaaactggatgcgtctacgtagtacgattgattttcttgggttatgggaaaaactaaataatccaaattttaaaggcatcgaattcgatgcttttaaaatggagagtggaacaaacagtttcaccctaacccccaaacaatggatagaaaaaactaaagcaatagggattatatccaagcccggacgatatgggggaacttttgcccataaagacatagcttttgaattcgggacctggctcagccctgaatttaaactatatctcatcaaagaataccaaagacttaaagaagcagaatcacaccctttattaagtgaatggaacgtaaaaagaatacttagtaaagtaaattattccatacatacggatgcaatcaaagactttattatacctaaagtagaagatttcaatcaaaaacttgtttatgccgatgaagctgatttgttaaatctcgcattatggggatgtaccgcaagacaatggcgtgaagcaaatccacaatacgcagataagaatatcaatatcagagatgtagcaagcataaatgaattagtcgtattatcgaatatggaatccttcaatgcagagttaatcaagcgtaaggtagacaagtctaaaaggtttactcatcttcggcagatggctaaagagcaattagcacacttgaatacgattgataccgaaaagaagttcagaatactgacggataatgacaagcaattagaataatctctacaagatcatttattaaagtatcattcaatcatcttaatcaagcgatgcacatcctagtttctgtaatcatcatagtaagcgtcatggcctttttcttttacgcttcttacagcatccgtgcctgtatttacatgcgtgtcttctgccgtaaaaagaccgaagagaaaatcatagccatcacttttgatgacgggcccgatccgatacagactcccaaagtgctgaaagtgttaagagaaaaacacataccagcctgctttttttgcatcggaaacaagataaaaggcaatgaagaactgctccggcaaatcataaaagaaggacatcatatcgggaatcattccttttcccattccggctattttcctctctataccttcaaacggatgtgccacgatttaattacctgccagcaagaattggaaaaagtgaccggccaaccggtccaatggttccggccgcctttcggagtgaccaatcctaccctagcccaagcagtgcgcaggctgggatactttcccatcggctggaacatccgcacactggacactcagcaacccactcctgaaaaaataataaaacgcatcaagaaacggctcgttccgggctccatccttctgctgcatgaccggatgcccgatagtgacaggctgctggtacaagttctggactttatagaaaaagaggggtatacggtggtagcattagacaggttgataaaggacatgacaaaataaatttcttctatattttcaacagcaacatcaccaagttccagaaacgagccccggttcacccttcatgatcaaaccgataaaaagataacttcgtcttacgtaaaatataaaattcttccgccacttcattccactcattaccaacaacttgccgtgtaaaaaagtctgtaatacccccaaaccggtatgtaagcgatggagtggaacattcacccgttatttgcaagagaagcgtagatatcagattaaatctgacaggatatgctgtactttcgttcaacttaataggatgtcagtgtgtaaacttccgatatatactgttgcttcaccagtgtgaaacggtggtttcacactggtgacaacagctcttcacacaggtgaaaacccatcttcacctaagtgaaaatcatatcctaccgttctccttgcaagaattccaacagaccttcatcctgcataatgacgctttctgccaaactgactccgacagggaaaacggataaaccgtttcgaggggatacaggaggattcttcactataaattattgattaacaataatatgcggtgatgaaacaaaaaagtattgcaacgcagaaatataacttttttattcattataattgcccatgtgaacgattgtagaaacaggtaaaaatcgtaaataagcgataaaggtatgaatggtttcccaaaatatactatctttgcttcccattacaaacggataaacctctataaagtatgacctacatgaaaatacttttgctcttgatgttctgtacagtcctgccgatgcaagcccaacagatgaagaaacttactgatttgaaagattttgaagcccgtctgctgcaagaggctaaaaatatagagtccatcgaaagtaatttcactcagataaaatatctggatgtattcgatgagaaaataacctcaaaaggaaagttctattataaaaagagcaataagatatgcatggactacgcacagcccatgaactaccttatcgtgatcaacaacaaccaactgaaaatagtatcggacggaaagaaaagcatcatggaccttcactccaacaagatgatgaaccagatgcaggatatgcttaccgcctgcatggtgggcgacctgtccaacatgtcgcccggctatgttttagaatattttgaagacgcccattactatctcattcaaatcaagcccgtcagcaaagcggtacaggcatatatcaaccagattcaaatttatttagacaaaaaagacatgtctgtccacaaactacgtttatcggaaaccgcaaccaactataccgaatacgaattctccaacaagaaattcaattctttgaaagatgagacaaagtttacgatacgctagctggctgctgttgctgtttattctgctctcttgctcacaccgggtgacgggggaagctacggcacttcctcccatcctgcaggcagaagcacagtcgcaaaagtacaacctgcaactggatttcatgaaacatcatttcagcggaatgctcattgtccgccaaatgcctgataacgaaatccgtatcctgggatccacttactttggcctcagcctttttgacttctccctgcactgcgacactttcatagtaaacagttgcatggaaccgatgaggaagaaaaagatgctgaaaatactggaaactgatttcaaaaatctatttctaaagagtgaaaaagcacatattaaaaagaaaagtagtacttttgaacaaagaatcagtggcaaaggatttggaaagacgatattcaccttgtccggcttcgtaaacggacaggcagggaaagtacaaatcaagcatccactgatacggttaagaattcaattggacaaactgaacataaacaacccttgagatgctgctggagaacttttataaaatcattcatagaaaggaaagagaagatgggaaacgggaaatagagatagagctgaatcccggtcatgctctctatcagggacattttcccggacagccggtggttccgggcgtctgtaccttacagatgataaaagaaagtgccgaacagatcgtcagccaacctttgcagtatgtacagattgcttcttccaaattcctatctgccatcaatccgcttgaaactccgcgactgcaactatttatccgactagaagaaacggaagagcatcttttcaagttgcaggcagaaggcatttgtaatggaaaagaatttatcaagttgaaagcgacactgatgacaaatagtaaaaagactcattctttgtgataaatatcggatacattttctccgacatacttcgtcaaaatacttgtaagtatcagaaaagcagattcttctgttaaacattcataatagcaagaacaataagtccatttatacttgtcagcatctatcaaatttcttatatttagacaatctaaatctgatacttatgaagaaaggttggcagcaaataatgttatatcttatagttctcacaagctatgggtgtctttctgatgaagacaaatgtatccgtcagttggtgcaggggtaggtatctgccttccaaacgtttcagactcatgttttctaattattattcccggcaacggttgtggcagttgcattcaggaggcaatggacaatatcagggaagcaacagacacgatatatgtctttatgtgtgatacggaaaaagatttcttcttgctgagcggtggcaaaaaatcaacggatttcaacaatctttacctagataaagacaaagtatcagccagactaaaaatggtaaccacttttcctatggtatacttcttaaaagacgggaaatatgtagaacgtcggccttatcaaagacctacggcagagagcaggaaacgaatgaccactctgaccgctgacaagcagtatatcgactggggtagtttcagacaagcggaaatacaggaagagaaagtaatattgaccaataccggaacagatactttatacatcaatgccatagaatcatcttgtgaatgtaccactgtacaatgggcggatcctcctgttccacccggcgagtgtactacgttgataattcattttcgagcggaagagaaaggggaatttgaaagatttatccatgttcattgtaatgtaccggaatctccgatagaaatttccgtaaaaggaaaagtacaataaatctaaccattaaaaacgaatgcctatgaaaacaaaattcacaatgatgatggctgttattgcaacatttgcaataagcttgaacctccactcttctaatgaggaagtagtgtttggagcacctgccgtgcaaatgccacgagggggtgaaaagtactgtgcttttaaggacgattggccagactgtaaaatggccatcgaaggcacagtgtgtatcagtgaagacggtaaatgcggtaatggggtagaaataggcagacccggtgagggctcaggagaagatgggaatcatagtgctcctaccaattaacaaccaacaatttatgtggccggatttttaaccggccacataaattacaaacatcataaaaccgaaaatattatgaatcgaacacttctttttataacagcactttttgttctgattttcatgtcttgccagtccacaaagaaaaacaatgcggaaagacagaacgaagtagaactggtagcagaaaaacagctggccttccctttagacgaacagacctattacttaagcatatccatatatcaatttgaagaaaacgggaaggaataccttcactttgaaaatacacgaaaatcattatatgacatcgtcatttttgatatcgaaaacaaacagatagccaaacgaatacctcttcacaagacaggtcccaacggattgccggcagtatatggaagcaggccttcccccgactctaaatacatattgatcgcacaaaatgatatcagccggctcagctccataaacgacaagggagaagtgatacgaaactatgatttccaaactcctgaaggcaaattcgctccgttacattttggcagctattacaacacgcctgcttttgtcaaagactcatgcctgttcatggaaatgagtgcccacaagcccaacatgaagaaaaaagactggcccgagacacatatgttcgcctcgcaggatctgcgaacaggagaagttaaatggattcctattttctatccacccatctttaaagaggaatatgacaatatcgcaggaggatacggttttagttatgattacaactacaaagaaagccgtttggtctgcggatttttcggatatgacagcctgatggtcacagatgacttgaaacacatccgatggtataacgccaaaagcagatatctgaaaagcatgaaacctaaactcggaaattctatggaaggcatcaatgccattataaaactcagagaaacaccgaaatattggcatatcatgtatgacaaataccgcaatgtgtactaccgttttgctgagatgccttacaaactggctcccaacgaaagcccctatgacgaacccaaaggaaaggagttctccgtcattgtactgaacgcggattttgaaatcattggagaaacgagattccccggaaagaaatatttctataaaatgagctttgtgggaaaggaaggactgtatatatccgaaaacaatctggaaaatccgcaatttgacgagaacaagttggtgttcacctgctttaaaattaaaaaagcatctccaaataaataattaacgccagaatgcccgcatccgaaaatatactatctttgtcacccattagaaaccacataaattcagatacgaaagtattcatcccaaacgtatctgaatagtttgactgaaaaacaagatgaatacaaacacaacatcggtttggcggaagaaattaaaggaactggagattgtcgtcgttattcccacctacaacaatgggaaaacactggcggcagtcattgaggaggtatacaggtatgcagacgatatcattgtcatcaatgacggctctacggatgatacagccaacattctggaacaatatccggctatccgcactattacccatccagtgaataaaggaaaaggaaccgctttgaagcatggtctttcccaagcaaaaaaagagggtttccgctatgccatcaccatagattcggacggacagcatttcgcttccgatattccctgttttatcgaagccattgagaaagagcccgacacgctgctggtaggtgcccgaaacttggcctccgacaatatgccgggcaagaataccttcgccaataaattctctaatttctggttcagactggaaaccgggctgaaactggaagatacacagtcgggataccgtctctaccctctccgcaaaatggatgtgcaaagctgctggtacaccgccaaatatgaatttgagttggaagccatcgtcttcgccgcatggggagatgtagtggtgaagaacattcccatccacgtgtactatcccccgcaagcggaacgggtatcccatttccgtcccttccgggattttacccgtatcagtgtgctgaacacggtgctggtgctgattacctgcctttggattattccccgtaacctgctccgcaaactgtcatggagcaactgcaagcggttctttaccgacaatgtgctgaatacacgggaatccaacctgaagattgtactcgccatcatgctgggtatttttatgggtattgttccgttatggggttatcagatgctgatcaccctctttcttgcgcatctgttcagactgaataaagtgattgcccttgtcgccgccaatgtcagtattccacccatgattcccctattgctatatggcagttaccggacaggctgcatggtactgggtaatcctcccgatttgcacctcggagacctttctcttgaaaatgtcaaatcagttttagagcaatatttaataggaagcattatctttgcaatggcttgcagtctgctgtcgggagtaatctccaccgcgttgctggccatatgtaggagaaaaaacggatatgactaaattctttgttggattatataactattttgaaaggcataaagtcttgttttacctgtccctcagcgtatgcattctctttatggccctttttgccgcccaagtcagattcgaggaaaacgtaaccagtttctttccggataccaaggactcccaaaactccatcaacgtatttgaaaatctgaagataaaggataagattataatcatgctgtccggcaaggacggcatggcggatgcggattccttgattgaagctgccgaaacaataaaacaggatttacaacaacaagcggaaggaaccctgattaaagagatcttctcaaaagtcgacgaaaacctgatcaacagtgccggagattttgtttacgacaatctacccttgttcctttccgacgaggactaccaacggctggataccttgcttaccgacgaaaacatagccgccctgatgcagaaaaactattccaacctgatatctccggcaggattcgccttgaaggactatcttatgcgagacccgttgggactaggcagccagacgctgaaacacctgcaagacttccagttggaatccaattacgaactgattaatgaacatattttctcacaggacggctccaccctgctgatgttcatcactccggtattcaacaccggaagcacgggcaaaaatgacaaactcatccggctgattgaagatgaactgcaaaaagcggaaaaggaacacccccaattagttgccgaatatttcggaggtccttccgtaggagtgtacaatgcacgacagataaagaaagatacgcttgtcacttcttccatcgcactgattatcattattgtcttcatatctctggtattcaagcataagaaatccattccgcttatcatcaccccggtgctgttcggagctctattcgccttatgccttatctactttatcaaaggcggcatttcagccattgccgtaggtgcgggttccgccgtaatgggcattgccttaagctactccatacacatgctggcgcatcagaatcatgtatcatcggtgcaacaattaatcagagaaatcgcctatccgcttaccgtaggcagttttactaccatcggcgcctttttcggcctcatctttaccagttctaatctgttacgggattttggtctgttcgcctcgcttgccttgataggaaccaccttgttttgtctggtctatctgccgcattttctgaaaggacaggcgcatgtaaaacaaggggcggtactacgctttatcgagaaactgaacgcttatccatacgaaaagaacaaaggactggtaggtttcatccttattctgaccttagtatgtatcttcacttcgcagaacgtgcgtttcaacgaggatatgatgagtctgaactatgagcctgcccacttgaaacaagcggaaaacaagctgaccgaactctttgacaagcaagaaaagaccgttctctttgtcagtacaggcaaagatatgggagatgccacgggacaatacgccgaaacaaaccggctgctctcccaattgaaagaagagggaaaaataaaagattatgcctctgccggacagtttttgataccggaagaggtgcaggaagcacggttgaaacaatggcacaactactggactccggacaagaaagcctggctacgcaaaaccattcggacagaagctgcccgctatcatttccgtgaacatgcattcgagccgtttttccaatggctcgaccgtccgttccagcctttggactaccaaaatgaaatcacgacccagcttctgaacgaatggcagacttccgctgattccctgaccatgctgattactcaggtacggatgaacgaggccgacaaggaagcggtgtacccccttttccaacaaaaagagaaggtggttatctttgaccgtggttatttcgccaaccaatgggtatctgccgtcaatcaggatttttatctgattctttatatctcttctttcctgattttctttgccctatggatttcctacgggcgcatagaactgactctgatgagtttcctgccgatgctggtcagctggattatcattgtgggattaatgggcatactgggtattgagttcaatatcatcaacatcattctgtccacttttatttttggaatcggggatgatttcagcattttcattatggacggattgcagaataaataccgcacaggacggcagttgctgaactcgcacaagacagccatcttcttctccgctttcaccaccgtgataggtatgggcacattggtcttcgcacgccatccggcattacagtccatttccctcatctccattttgggaatgattgccgtcgtactggtggcctacacactgcaacccatccttttccgattcttcatcacagcccctgcttccaaagggttgcctccttatacattgacaggactggcaagaaccggctgcttgttcctgctgttctttatcggatgcctgttcctacgcttgctgatagctgtcatgaccttgcttcctatccgcaaagcctataagaaacaagtactttgccaactgatacatgtcacctgcaaaggcctgatccatatagccacatttgtacataaagaaaagataaaccggacgggagaaacgtttaaaaagcctgccatcctgatagccaatcatcagtctttcatcgacatactggtattgctggcactgactcccaaactggtcatgattaccaatcactgggtatggcactctcctttcttcggagccattatccgctatgccgatttctattacgtaggagacggttatgagctttacgtggaacggatgcgccaaaaagtgaaggaaggatattccatcgccatcttccccgaagggacacgtacctacgatggaaggatgaagcgtttccataaaggagcattctatctgtcggaaaaactgcaactggatattattccggtcatcctttacggcaactgtaaaatcatagcgaaagcacagccgttcaatgtacggaaaggcatcatgctgacagagattctaccgcgtatcccagccaacgatgctacgtacggaaccacttatcaggaacgtaccaaaaacatctccgcgtggatgaaaaaagaatatgcccgtatctgtcgggaacaaagcacaacggacaatcccgtcttctacgaaaatctggtacagaactatatctataaaggaccggtggaggaatggtacatacgcatcaaggtgaaaatggaagataactacaggctattcaaccaactggttcctgtcaaaggacagattacagatatcggttgcggattcggaccgctttgctatatgctttcccagctttccgaggaacgggagattacagggattgattatgatgaggacaaaatagcagtggcgcaacagggttggctccgcactccccacctgcaatttgtatgcgccgacgcattggaatatcctttaccggaaagtgacgtattcatactgaatgacatgcttcattatatgagttatgagcatcagcggactttattactcagatgcgtggaacggttgcgtccgggagggaagctgattgtgcgggacggcaatgccgccaatacaggaaaacaccgtctgacccgtttcaccgaactgctgtctaccggcattttcaactttaacaaaacgacagaacaactgtgtttcacatccgaagagcaaataagtagtatcgcacaagcatgtgggatgcagctggaaattttacctaacgacagatatacttcgaatacaatttatatcttccagaaaaacaaaccggagcatgagtaagtacgatatcatcatcataggcagcggactgggcggtctggaatgcggagccatcttaagcaaagagggctaccacgtctgtgtgctggagaaaaacgaattgtttggcggctgcttccaaacttaccaacgcggtgggcaccggatggataccggcattcactatatcggtagtctggatgaagggcaaattatgaaccagtatttccgttatttcggaatcatggacaagttatccatcaaacggatggatgaagaagtgttcgaccggatttattataaagacgctatctatgattatgccatgggatatgaacgttttatggaaaccctgtgctgctcattccctcatgaacgggggaacttgaaaaaatatgtggcatccatccggtcggtgggaaacctgatcagcatagatcacctgagaaaaggccgcctgtcccaagaaggcatggatttctttgccacctcagcagccgggatgatagcatccgttaccacgaacagggatttacagaatgtacttgccgcaacctccctgctttatggcgggatcaaaaataaatctaccttttatgagcacgccatgattaacaactcttatatggagagcgcctatcgtttcacggaaggaagtatgcaagtcagtctggaattaatccatatcatacgtgccaacggcggcacggtactgaaccggaaagaagtgacccgtatccttgtcaaggatgaagccatacaaggagtagaagtgaaccatgaagaggtactggaaagtacctacgtcatatccaacctgcatccgcaactcaccttatccctgctggataagaaccattccatcaaaccggcttttgtgtctcgcatcaaatcattggaaaacagctacgggatattcacgctcaatctgatgatgaaaaaagacagttgcccttatcaaaactataatatatacctgcacggcaatgaggatgtatggtatgacaaagaggcacacaaaggaaatatccccagttgtatgatttccatgcaagtaccccacggaaacagcagattcacagatgtggtttccatactgactcccatgtatatggatgaggtcagcacatggacggatacgactcccgagcaccgtggagaggcataccgccagtttaaagaaaaaaagacggaacagatcttgcagttcctgagccggttcgggtttcactggagtcattgcattgaaaaggttcatactacgactccgttgagctatcgggactataccggaaccatagatggttcggcatacggcattgtcaagaattaccaatatccgcaaatcagttttgtgtctacacgcaccaaactgaagaatctgttcctcacagggcagaatctgaatgtacacggtgccttgggtgtgacgctgacagccatgctcacttgttcggaatttgtaggtcaggaatatttagcaaaaaaagtaggcaatgcataagatttggaagaaaacaataaaatacggggggatagccctgttgattctgatagcgacgatcatgataggcatgagttatctctatctatctgccgatatgatgactccgcaatttgcgtctacccctgaaacggatcgtgtgatacggaaagacagcctccggcagtatggcggaaactatctgcggcacagtgagagcggactttgggagctgaaagtaagcggacctgcctacgaaaggggcgaagccataggcaagctgacttccgatttgctttattttcaagaaaaagtatttgtggaccagataaaagagatagttccctctgaaagttatcttaaattcctccgcttcttcattgtccttttcaaccggaatctgggaaagaatgtgccggaagagtttcgggatgagatttatggcatctcactctcctgtacccacgaatatgattttatcggcactccttacgaacgtcaattgaattaccactccgcccacgacttgggacatgccatgcaggactatatgctagtaggatgcagttcctttgcctgttggggtgaaaacagcgctgactcctcccttatcatcggccgtaatttcgatttctacatgggcgatgactttgcacgtaacaaactcgtttcattttaccagcccgaaaacggatatcgtttcgcatccgtgggatgggccggaatgaccggtgtcctttccggcatgaatgaggcagggcttactgtcactatcaatgccgccaaatcggatatgcctgccgcatccgccacccctatttccattctgacaagggaaatattacaatatgcctctaccattgaggaagcatacgctatcgcccaaaatcggaaaacatttgtgtcggaagccatattagtcggttcggctcaagatggcaaagcggcgattatagagaaatcaccggagaaaatagctcttttcacgggaaacggacaacagattatctgtaccaaccattatcagtcggaaacattcagccatgacaaacgcaaccgggaaaacatagaaacttcggacagtccctaccgctttgcccgtttgcaggagctgctgaaagcaaacatccccatagatgcttcgaaagccgcctctatcctccgcaaccggaaaggagtgggaggagcggaactgggacttgccaatgagatggctatcaatcaatttatcgctcatcattccgttattttccaaccggagaaaaagctgatgtgggtatccacctctccctggcaatgcggtaagtacgtggcatacgacctgaacaggattttcagcgattccatcgatttcaaccatgaaatctataccggagacctgaccctgcctgcggactccttcctgcaacaacaggaataccaacaactgatgacttacaaaagattggctcctgtactacggaagcagattaaaaagaaagaacggctggacgaacaaacactgcatgccttccaacatgccaaccctcatttcttttatgtgtacgagttactgggagattattaccatgccactggacagcaggacaaagccctgcgcaattggaagaaagccctcttgcttcctatccccaagcgaagtgaatcagaacgtatagaacataaaataaacaactaagatgaataagaacccggaaatacaattccgctcccctgaggaaatcaaagcctatcaggaaagccggctggctgaggaactgctttatttgcagaatcattcacgattctaccaacgtctgttccaagcacatcatatcgatatacaacagataaaaaccatagaaggcttgcaacagatacctgtcacaaccaagacggacctgcaacttcataatgaagattttatctgcgtgagccgcgatgaaattattgactatgtcaccacttcgggaaccttgggcgaccccgtcactttcgtattaacttccgaggaccttgaccggctggcctacaacgaatatctgtccttcaccaccaccggatgcagcagacaagatatactacagctgatgaccaccatcgacagacgtttcatggcaggcctcgcctactatatgggagcccgtgagctgggcatgggagtagcccgcgtgggaaatggcattccagaactgcaatgggacactatccggcgcatccatcccacgtgtggcatggtagttccttctttcctcatcaaactcattgaatttgctgaaaagaatcatattgattaccatcactgctccatgcagaaatgcgtatgcataggcgaagcactccgcaatcccgatttcaccctgaacacactgggtaaacggatacacgagaaatgggattccctgcaactttactccacctacgcatctaccgaaatgcaatcctcgtttaccgaatgtaatgaatttcacggtggccacctccagccggaactgattatcgtagagtttctggatgataacaaccagcctgtaaaagaaggggaagcaggcgaagtgaccatcacgactttgggagtaagaggaatgccgctgctccgtttcaagaccggagatatctgttaccattataccgaaccttgcgcctgtggacgtaacactatccgtctcagctccatactggggcgcaaaggacaaatgataaaatataaaggtacgaccctttacccacccgctttattcgatattctggataacatcccccatatcaagaattacattgtagaagtttataccaatgaactgggaacggatgaaatactgatccgcataggaagtgaaaaccgcagtgaagcttttgctaaagaaatcaaggatttgttccgttccaaagtacgggtggctccgagtatcaattttgaatcggcagagtatatcgcgaaaatacaaatgccgcccatgagtcgaaaaatagttaaatttattgatttaagataatatttttctacctttggcagcaacaaaacaacacttaaaaaagaactaatatgaaacagttactcgttttattattccttgtaagcagcatggcttgcttcggacaaaacaaagacgcattgaaagatatctcttctgtgacattttatggcatagactttacccgtgccaaagtgtacggagcaaaagaaggccccatgcagttcaaatatacttttgatgacatcaacaagcttttcatcactgagccgaagaagtatgatattggcaaaagattgggtgtcaatgtagaagtgacctcattagaggcagtaaacgatgccaacaagaccatcaatcccgatgagatcatgacgaccaacagcggatacaccctggatgaaaaacagatagaagaagtcatcaagacacttcctattctctctcaagaagaaaaaacaggattgataatggttgccatgcttttaaacaaggcagatgcaagagcaacctatcaaattgtgttcttcaacacgaaaacccgtgagatactgtatagcgcaccgactaacggcaaagcacgcggtttcggactacgcaattattgggcaggttccgtacacagcgccatgaagaaactggactaacatataatcccggttcactgtagggatgaaatgttcccacccgatgccacaaaatcaatgtatccggatgagctcaattcactcctacagctaataaacctttttagtcaagcccctacggtggcagaatactaccaactatatcctgataaggataagtaaaccaaaaacaagagccttctccttcttctgactccacaccgatagttccacccatctgttccaccagactcttacaaatagacaagccaagtcccgtaccatgaacaaaactgttcagtttcacaaaacggtcaaatactgtttttatcttattccttgggattcccattcctgtatcacgaacataaaatcgcagatacccatctgtctgcctataatatcctaacgttatgctgcccgaaaaagtgaacttcaaagcgttattaatgaaattggaaatgacttgattcaaacgattcttgtctgcccatacatgacattcgggcaagcatttttcaaacaccagctccacaccagccggtactttcatgcgtaaagaacggataatctcaccgcaaagcaagttgacatccgtatcactcttgacaaattcaaaagctcccgactccatcttcgataaatcaagaatatctgaaataagctgaagaagcaactccgtattctcctgcacaatagccatgtactgcttgcggtccttcatatcttccgtttccgttaaaagactggaaaagcccactatagcattcagcggagtgcggatctcatgactcatattagccagaaaagcagatttcaaacgatccagttcttccgctttatcccttgccgctatcaacttccgctccgtttctttcagttcagttatgtcataattgacacaaaccatatcaatgatcccatcttccggacggaaatcgcgtaccattacattgactcttgtccacgtataagtgccatcttcacgtaatatacgtacatcacgcctcaaatggctggcttcccgtatcaatacctgatcaaagaagcgaagcatcatcctgcggtcatccggatgaaaatgagaatgcactttgataatctcattcaatggagttccttctttctcacctatattccgataccagctattcacagcatagccatcacatttcaaggcattaaaatgggcatatcctactttggcatagttacctatcaacgtgaaaaactcctcaaagtcctgtattttgctgtatgcatttgttgtttccgtattatcaatattaatcaacaatatatttatcagattacccaaagcatcataaagtggagcgaatttcgagattaaactaatagtaccggtacgagaagtagaataatagccatccaaacggtcgaaatcataattaaacgacatatcaataggtgctcctgctttcaacttatctttcagcccctgcggcagcaaaggattatcaaataaattcaatcctatcacatcctccttatgccggagaccgaagatttccatctccttctcattcaaatctgtcataaacccatccttatcatacaactcgataccagcaggaagatttttataaatattctgcaaataagctttttccagccgggcttcagattcagaacgtctcaattccatacaaatgctgataatattacccaaagacacaaaccattgataatcctcattacaccagttccgatgctcacgcaccatatccacccctacatacccccacactccgtcttttgagttcaaaggcaccaccatagtagatttcactccatattcctctaatctacgcttatccgccccggctgaatcaggaagcaaatttaatgtaaaaagaatgataggattaccagccaatatctgtcctgtccaccaagaggcataatcaatagaagattccgataataaaaccttgcgttcttttataccctccactgctatttcataggtacagacttccgtatgcaatttcctgtcaaattcaagaatataagtacgatctgcttgaaattggcgcaatacctcttttaaaatcttattgataaccaaggtaatatcatcagaatgtaaaaaatcaagcaatgacttggaaataccgttcaaacgagataataaagaattcaaccggtctactgtctgctcctgcatattcatccgttgccgggaaatacattgcaacatacccatgacgcggacatgaccttctttggtaatacgcttctcaccgaccttagtactaacccacatcatcccatatttggaatgtatcggaaaaacctgctcataaatctccatcatccggaaagagcgaaattcctccaaaatacgttcccgataattctcacaaatcagattagcgaaatctttagcagaaatcttattcccttctattcctaacaaatcggctacaaactcagaacaatagtagactccttcatcaaaatccacctcccaccatcctatgcgcgccattgatacaagctgctgcaaccttgcatcattttcttgaatcttccccatatttacactacccttgaattttatgtgccaagataatcattatatttcaatacgaagtgattaaacatgaaaaataaagaccaacaacaaataatcaaagcctgaaatctatttttaactctgttcatttgcaaatgaacagcaaactgtgtattttcgtaaaggaactacattacaaaccctgcaaattcatatgactatgaaacgtaatatcctattattaatgattttgacggtaatatccctaggagcatccggacaaaaatatacgatttatgtagatgacttcgacagtgaaatcaaaatacccaatagggcgatcaacctgattcgtctcgcatttatcgacggtattcgtaacaccaaccgtatcaatgtagtggacgccgtttcggctggcagtgatctcagtctgagtccgctggaagatgcacgccgcttcagagcagagtacctgttaaaaggaaacctgatacaaagagaagcaaccgatgacggaagctcccacagacgttaccacagccgtgagaacagttataaagagaaattcaccctgcgtcttgatttaatacggacaagtgacggagtaactatcagcacacgcaattatgaagaaacaggctcagcatccggtaaagatgccacccaatatagcgctttagagaattcattaatcaatgtgccatacgaaatgggactttttgttgaaaatcacttcaaagtatacggttcaatattgaaagtagtatctatcaaaagagacaaggcaaaaaccatttatatcaacctgggatatgatgatcctatcaaagaaggattacgctttgacgtagtggaagatggcatactggaagaacataatatagaaaccaaaatcggtgaaatacggattaccgaaatcatgggaccgaaaatctctttatgtaaagtgaacaaagggggtgaaactattcttactgcattaaatgaaggaaagaccttgaaacttatttccagacaggccaaactgttcgatgaataaaatatcattcataatgaatatacaacactacaaccgccgatccggcatctgccaaaacccggcggttttactatgtcaagacaaaccgctacttttctataatggaagttagaggatgacgattcccctttatctctctcagaaatgcttttgccgaaccaaaattcaaatataaatccaaacgcaccggcaaatggtttttatcatcagttacataaaaggttattacctctttttcttttccttttttatactctactaaggaaaaaaccaaacaacggtatttcacaccattctccgccttaaaattcttccggccacgataaatcaatgtttgctgctctactttagtacctgtagccatatcaaacaatattttatcgccgactttatagtcacttacatcaaatgaacgtgctctcatcaatatgctcagcatatcaaagatacactcatcactttggtccttcgatttcaccgtatcccgttccctcctcatacgacgctgatcggcaatgcattttccgtttttataactgaaccatacttcatccaccgtatagcggtcaccctcttcggcccctttacgaaaataaacgggttccagacgactgctggtaatacaagtcaatgtgtcacgcatcttaaaaaagaaatcgacttgtttgttactgacagagatcagattactacgaaaacaaggtttcccctgataggtaatagcctgcatgtccatttttgcctgtccggcagcaacccaaataaatttccagttgaacttcaagtcgtataccaactcttcgcccgcctggatggcttcgttttgtgccgcacattgcgctctagttgccattatagcaaaccaaccacacaataatattagaatagtttttttcatcggcctagctttctagctctttctttatttctatcttgtacctttttagtctcttccggtttttgtttctttatttcatccagcttttgcttgtctacaggaatggcattcacatcccaattctcttcaaattcaaagttggctttcatctcccataccttcgggaaataaaaaacttcttcgggctgaatcttcttatcataatctcctgtatcccatactccattatcattacggtcgttaaacaaacgtatataatatttcgtactcggattcaagaaataaaagtccgccgttccttccaccgtcaccggttgctgacgcaatacatttccactagcatccaataattcggcaatagcattgggagcagccccttttatattcaataaaatagtcccgtattcttccattttcttcaccttcaccgtttgctggactttatctgtatgcagcccatagattcctgtaaatgccaaagaatcaatagtcaactgatattcctgctccggttgccaatctgccaatatctgatattgccgtggcatcaacgagtctgccataaagaagaaaggagccggttgccacaaactgtccacttttacttccatatgaatggccgccgtgtctatacttgcgatcggttcttcaaaagatagatagatattcctatatatatcgaatgccgacggagcatcgacattcatagtcaagaatttagtcggttccaccctgatggtatctccctttttctccctctttttacgttccttctccttttcctcatttgcttttttctgcaatttttcccgttgctctcttgtcaatttattagccagataaatcgtatcggttttgggaaccaactggtttaacgtatccgtatataaataatccaactgaacctccagcgtatccatctgataaaccaacgaatccttaatccaataacaaattgagtcgtttcgtggagtcgtttctatgataaacgcatccttctcatcgaagttcaatcctttcaaggtaggtaacgtatcagccggcgcactgaaagataatacaaaatgattctctttatcacgctcgctcttggacagatattgacggtcgtttatccctttaaaagctctcagaataatatcatccggcaaaaagcgggtatagcccaccgttttgatggtgtcaatagtaaccgtatctttccacaatgtatcctgacgcatggccgcttccatagaagggacaataatagaatcgctaaaagcaatcatctctgtcttagagtcatataaataattctgattaccgtccatcaaaccaaaaatatgatatttgccgggtgctataccacgaatagtgaaacgcccacgactgtctgtacgagaaacacgatcgaacggttttttggcaaaagcactatcatccaaatcaacatgcaaccccaccatcatccctttaactggttccaagtcagcagccgccaacacagttccggaaacttccaatgtatcaatagtctcccctgtagaaaaagaaaaagaataattacccagtggattaccctcattattatctacaatagcatccgagaaatcaatggtataggtagtattgggtttcaatgaatccatgagattaaccaaaactcttctgccgcttgccttgatatcaggttgttccaattgaggaggagacaccaccactttttctgatgttttctccagtttgataaactcatcaaattcaatggctatcttcttgtccttgttgtttgttgcgtatggcttgggagaacttctgacgaacttgggcggttcctcatcataaggacctccatccggtgttcccatgcttgcacaggaatatactacgatcatcagcatcaacaaagcaggtaatttatgttttttccaattcatgttcttattggttcaagcttagcatttcttctatataatcacgcgtattgcttaatctcggcactttgtgttgtccgcctagtttgcctttttctttcagccaatcgtggaacagattaggtcttgccacgattatttccaacggctgcaaggtaatgtttttatggcgtttagcttcgtaatcggagttaatttgttgtaaagaagtgtcaagaacctggctaaaattctctaaagaatctggcataacggcaaattctatcagccactgatgacggcacttggcatatgcatccatgaaaacaggagcagcagaataatcaacaatctgtgcaccggtcgcctcacaggcttttgctaaccctttttccgcattatccaccatcaactcctcaccaaatgcattaataaagtgcttggtacgccctgttataacaaatttataggggtgtttgttggtaaacttcacagtatcaccaatcatataacgccacaatccgcaggaagtactgatgaccatcgcataatttttatttaattccacatctactaacggaacaatatgaggattttcagtaccgacatcttccatcggaatgaattcataaaatacaccatagtcaatcatcagtaacatggaaggatcactgaagtcattttgtaatccgaaaaaaccttcactggcattgtatgtttccatataatgcatcttgtcactacgaataagctgtttatattgttcgcgataaggagtaaaagcaacccccccatgaaagaaaacttccaaattaggccatacttccaccaaattatccgttcccttcacctccaaaatatgtttcaagacggccatcatccaggacggcactcctgaaaggttagttacattttgattcattgtggcacgagtaatcctttctactttttcctcaaaatcactcagcaacgctattttcttctcgggcacccgaatcagattgaccaacggattcacattttcaatcaatatagcagaaaggtctcctacaagactccgtttcacattatagtttggtgcatggctccctcctagaatcaggccttttccagagaagaaacgactctcaggattttgttgaagatatagtgccactgcatccataccacctgcataatgaatatcatgaaggccatccctgcttacgggaataaatttgctcttgtcattggtcgttcccgaagatttagcaaaccactgcacctctccacgccacaggatatctttttccccatggcgcatacgctctacgtatggcttgatttcttcgtaagtctgtataggtacacgctggaagtcttgatatctctttatgtctttatagccatatttcaatccccactccgtattggcagcatcattaatcagccggcaaaatactttatgttggagtgcctcagcctgagttgcatacaaggctgtcgctttttgtctgggcttgaatagcgtactaattagtctggtagaattcatttgtcttagtatacaattcgttatatcttgcaaaaatagcttatttctatattataatggctgataacattattttttttatagttttctacattacttttattttttgttatctttacggtcacttacaacttaacatcaaaggctatgaagataggaatattgacatcaggaggagactgtcccggaataaacgccacaattagaggagtttgcaaaacagcgataaatcattacggtatggaagtttatggaattcatagcggattccgggggttgctggacaatgacgtagaaccattgacagaaagatcattatcaggcttgttaaatttgggaggaacaatattaggtacttccagagaaaagccattcaagaaacgcctgtcggcagcctcggaagacaaaccagctttgatgttaaagaatattcatgatttaggtctggactgtatcgtatgtatcggcggaaacggaactcaaaagaccgcagccaaactggcccaagcaggtgtgaacgttgtttctgtacctaaaacaatagacaatgatgtttggggaacagacgtttcattcggattcgattctgccgtaaccattgctaccgatgccattgaccggctgcattctacagccagttcacaccaacgtgttatggttattgaagtaatgggacataaagctggctggattgcactttattccggaatggcgggaggcggtgacgtgattcttattcctgaactttcttatgacatacataacataggtaataccattattgaacgcttgaaaaaaggaaaaccctattctattgtcgttgtcgcagagggtatccaaaccatggacggcaagaaagccgccgaatatatagctcaagaaatagaatatgaaaccggattcgagacccgtgaaactgtattgggatatatccaacgtggcggctctcctactccctacgaccgtaatctggctactcgtatgggtggacatgccacagaactgatcgcttccggacaattcggacgaatggtctctctgcaaggtgcggaaattggctccatctctctgaatgaagtggctggtaaattaaaacttgtcaatgaaaaccatgacctgattgtacaaggtaaacggatgggaatctgcttcgggtaagaagcagattcattccttttccatatatttggatggagacactccgaattgctcggtaaaatgctttcggagcgtacgtgtatcactatatcctaccatttcggctatttcctgaatggaatacctgttctccataataagggaggcagccttgcccatccgtacactccggatcatatcaatagcagccaattcgctacgttgctttatttttctataaagggtaggctgactcatattcaattggtctgccaacatttttacattaaagttttcattcgccagattagcttctatgacatgaataatttgctgtataaaatcatccggagcattattcccatccgtttccggttcactttcctgctgcttcaacatcaacgtctttgtatatatcctcttcaggcgttcccgctggagtatcaggttccggacttttgccttcaatacctccggattgaagggtttcatcatataatcatccacacctatttttgaagcctgcaacacatccgcatcctcagcctttgccgtcagcatcaaaatagggatatgtgctgtccgaggctgctcacgcaattcccggcaacaggtaaacccatcttttacaggcatcattatatcagaaataatcaaatccggaattttacttattgccacatcaaccccctcttcaccgtttgccgcctcatatacggcataatctttacagaataaagaacagacatagtgccggatttcctcattgtcctcaataacaagaagagatgtttttttattcgaaggcttgtcttcctgcccttccgcctgcattatcggtaacggaagagcatattcctccatctccggagtaccaacaatctcataccggtcctctgcaaaatgtgcatttccctcaggaatcaataatgtgaaagtgctaccctttccgagagtactgtccaaattcaccgtgccatgatgaagatccatcgtatttttaacaatacgcaagcctatgcctaccttattagaaaacaaaggtgtattttctccggtaataaatgattcaaaaatcctcccccgtaactcttccggtattcctttacctgtatccgatatgattatactgcaaaatgaatatccatctatctcgatacggttcatcttaaaaatcacctttccattcggagatgtatacttaaacgcattagataataaattacggatagccgaacttattttttccacgtctatccatagcaaaagtggctcattcagcgattcaaccgtaaagttaatcccttctgtttctgccagttcatgaaaagaatcggttatctgctttgccaataccactatatcgactttcgaaattcggagtttaatcatacctgcttcaatcttctgcacataaagcaaatgatcgaccaatgtctgcaaagaggttccattgcgatacatggcagccagtttagtatagacggtgtctgaagggcggacggttcctaacaattcctgcaggggagataagattaaagttaaaggtgtacgcaactcgtgagctgcattcgtaaagaaattctcgcgttccatccgaatctgcttctccttgtcacgttctacagtagcagcaaatatctcatgttccaagcgcaactcgtgctccaacctcttttgccgtaatttaatacgctgtataaccatataaattattatccctcccagcaccatcatacagaagcggaaaaagaaagtttcactccaatgaggcaaaatctctactctcaacgaggttattttactgtctctttcatccggataaatatttttcacctcaaaaacatattccccggcaggaaggttagcatacgaaactttttcccctccgttggccacaagccaatcaggctgataaggacgaagcctgtaactatacttctgctggctttcagaataagaaaggttattgaacgtcagcgcaaagtcacgattcgcatgattcaaccggacaaaaggcgtatagaaaatactttgtgaaagaatggtctgcccatttacctctcttcctatctctacaagtttattatttacctccaatccggtaatcacgacagattcggaagtggtaaacgctttaatgtcatcggggttaaaataagtaagattcttattattcccccaaaacagaacatcctcccaatgcaggacagaacggttactgcccgcaatgtaataattataaaacaaatgttgatgacgactataacgggaaatacctgaattagatcccagccagatttgcccgtgcgcatcctcagtcatacaaccaataaagttactgcacaatccatcccgggtagtatatacatgagttatcgcatcctgtccgggagagaaaactgccagaccggccatatatccgacatatagattaccatcggacgaagctaataatgaacgcacagaattctcaaccataccgtacttcttttcatagccggtctgcagttcattttcatttatcactttacatataccataattagcagtgcccagccaaagcgtatgatcatcagtttcagccatagcacgaatataaagaggagacaaattctgtaacccggatactttaaaatgcatcttcttacacctgttcgtctcacggtcgaataaccagagtcctttatgtgtaccaatccaaaaatgacctttgctatcaaggaataaggcccaaactgatgatttgttaaggtcatcattttccgtaatcaatcgcaatatcttgaatgagcgttcctttttataataacaagtcaatgaaccatctaaatttccaaaccataaatttcctttctcatctttcagactgcacaacactgtctgttgttttttcacattttgatctcccacttgaaagaagtctattttttctgaagtaccaaacgctgttcggcttcgcataattcctttatggtatgttgccaaccaaagataatgatcgtcatccgctacaatagaacaaatctcattatgcctgtcctgataaaaacgattataaaactgcatacgcaaatccgaccagattactcctccaccatccgtaccaatccacagaataccatgtgaatcgtaataagccgcaatcatcctcgtttcaagattgcggtgcatcaaagaagaagtgttactataaatttctgtcaatatcccgtcctgattatttttatctattgtcatcactgtatatccattccacgttacggccaaatatctattctcattcaatttgataacaccgaaaacatctgtatgagaaagtttgtcggataccggagccacatgataagtcagctgcttgattttcccagtccgttcattataataaataaccccatgagcaattgtagaaatccatatccggccatcatcatacaaaacagaatttacagacagactaccggtacgacccaagtcaatcacccgaaagaaactcaggtttgtcgcatccagcaagataattctacctttttcatcaatcaggcagatactttttttatccgaagaataagttatggcaaccaaaagattatcctgattatcccagcctgtatatttttcttcaacccggagccgaagttcaccttcttttgatgcgcaccgcttcattaaatgtaactcacttccggaaatcacccaaaccaacgaatcattcttctgcaacatccctcgagatggaatgccctgtcccgaagaagaaaccacagacaaaaagcgttcttttttcaaatcaaatgcagaaaatacaccattatccacaaatgccagcaccccatcaaaagcttccttcaagtttgagatactaggataactactacttatttcgaagtttgtaatccgcctgccgtcataacgactcaacccgtttcgggttccaaaccaaacgaaaccttctttatccttataaacagcagatacggtattatcggccaatccgttttgcatattgagcagatgcacatcttttgaaaaaaaagcataacacacatccggcagcaatatacatacttcaattataagcagtgataagattttaaggttcatatttaattcattacttgtagcaaaggaataaaataaaaaagagataacaacaaagattcaccaaaaaatatagagatgcattaaacgtgcatactgaatgaaatgaacatgtacaaaacgatttcattgattaacatacatttgcaatacattaacctaatgtctaattaaaaacagaaaagcatgaaaaaaaacttgattctatttttgatattgctttgtaactgtacattcctgtacgcccagcaattcaacatcaccggtgtagttacggataaaaagctcaaagaacctattattggtgccagtgtcattgtcaaaggaacaacctatggaacagtgacagattttgacggaaatttcacattacaagtttcaaaaggaaatgtgttggttatctcttttattggatacaccacacaagaaattaaagtaaatgaaaatcaattctcgtataacattcaaatgtctgaagacacacaaactttagatgaggtcgttgtagtcggtttcggtacacaaagaaaagctaatctgacagaagctgtagccacagtagataccaaagtactagattcccgccctgttaccaacttaggccaatcattacaaggtactattcccggtttaaatttatctgttggaggcttaggaggacaattaggacaaactatggatgtgaacatccgtggtacaggtacaatttctacaggttctaaagctgctaccttagtcctgattgacggtatagaaggtaacatgaacaacttgaatccagatgatgtagagtctatctccgtattgaaagatgcagccgctagctctatttatggttcacgtgcggcattcggtgttattttgattactaccaaaaaaggtaaagcaggaaaagctagcctctcttattccggaaatgcccgttatgccggtcctaaccatttgccggatttaatgaattcctaccaatttgctaactattttaatgaaggtagtattaacggaggaggaaaagccatttttgatgaagataccatggaacgcatccagcaatacatgaatggtcaaattacaactagcactattgccaatgcaaatggtaactggcaattccatgaaaaagccaatgacaatgtaaactggtataaaactcattacaagtgggcatggtcccaagagcacaacctgaatatcaatggcggcagtgacaaaagtcaatattacgtatctgccaactatttggatcaggatggtaaccttcgttacggaaaagattcctatgaacgtatttcaaccaatgcaaaatttaacgcacagccttttaaatggttggatatagaagtcaatactaaatatgtttataccaaactagacaaccctctttatagcgacatgaatggactgttctatcatgatgtagtacgtatgtggcctacaatgccgtttaaagatcctaacggttactatatgcgcaacggaaaattagggcaacttactaatggaagccgctccatcaccagtaataataacgtttatctgcaaggacaacttgtttttcatcccttgaaaaactggaatatatatgcaaacgtaggattacgcttgattgaccaagtacaaagacagaatctgaataaagtatatgaacacaacgtagccggagaagcattagaactggcatacggtggagaatatgcggtgggacaaaccggagccatgcaatattggactaaagccaatcatttaacaaccagcctgtacagtgattattctttttcattcgatgaacatcaattcaaagtgatggcaggagttaatacagaaaaatacaataaccgttatctttctgtgaaacgtatggacctcattaccgaatcaatacccgaaatcggcgctgcaacaggtgaagataaaatcaatgaagccagtgcctatacttgggctacagcaggcttctttggacgtattaactatgattattctaataaatattttattgccggcaacttgcgatatgacggttcttctcgcttccttcgaaaagatcgttggggacttttcggttctttttctttaggctggaatatagcggccgaagattttttctctgtaaatgaaaacattatcaatcaattaaagcctcgtgtatcttggggcacactaggtaatcaaaatactaaatcttattatcccatgtatttattacaaacagtcaagaccaatggaggaagctggctaatgggggactctaaaccaactgttgccggtatgcctggaacccttagcagttcattgacttgggaaacagtacaatccttaaatatcggttttgatttagggatgttaaaaaatcggcttaacataaatttcgattattttatccgtaaaacattggatatggtcggtcctgcttctgaggtcgcttccatctatggcatcggtatgccagcaagcaataatacagacttacgtaccaaaggatgggaaatagcagccagttggcgcgacaagataggacagatcaattataatataggcttcaacatggcagattcccgctcatttgttgacaagtatcccaatgaatctaaatcgctcagcacctattataaagaccaggaattaggagccatttgggggtatgtaacccatggaatagctaaaagtcaatcggaaatggatgaatggataaaagataacaatccctcatggggttcaggctggggcgaaggtgatattatgttcgaggatcttaatggagataaagtaatcaacgaaggagccaatacagtagacgatccgggagaccgcaaaattattggtaactccaccccacgtttcaggtttggtttagacttgggttgtgaatggaaaggcatcgactttagtatgttctggcaaggagtcgcaaaacgcgatttatggttggatggtcctatgttttggggaatatcgggaggagaatggcaatcaactggtttaaaagagcatttggattattatcgcccagaaaatacaacttctgtatttggtcctaataccaatgcttattttcctaaaatgtatatgagcaaagatatgaatcaaaaggtacaaacccgttacttacaaaatggtgcctatgcccgtttaaaaaatatccaactagggtatactttcccgacacaaattatcaacaaactacatatgcaaaaattacgtgtatatgtcagtgccgagaatgtattgactatcaccagtctacctagcggttttgatccagaaacaacttattcaagttattctgatgggaactccggaaaaacttatccgctacaaacaactatatcttttggattaaatgcaacattctaaataataaaacatatgaaaaagattctattatatacattcatagccgctgcaagtgctcttgcgacctcatgcaatgattatctggattgcgaacctatcacttctgtcagcaccaatgtctatctttattccgaaacagacctagctgcttatgctgccaaattttataatgacagtgaaaacgaaaacgatgacgaatatggcaatattcttccatctcatggttctgccacttataatttaggattattccaaaaagataatggaacagacgatcaaaccgcagactcaccaagtaaacttttcataaaaggacaataccatgtcggtgacgatgacttatggcataaatatttccgtaagatacgtgcagctaattactttattcaaactgttaccgaacgatatgccaacagagaaatatccggtaatgatgcaaatatcaaacactatattggcgaggtatatttcttccgtgcttatatttatctcacagcattgcagaatctaggtgattttcctatcctaactgaaatattaccggatgattacaatgccatacgtgaagcttccaaacggcgtccgcgtaatgaagttgcacgctttatcttatctgatttagataaagcctacgaatatatgcttcccactgctcccgtaagcaatcggttaaacaaagactgcgctgcattagtaaaaagtcgcgcagccctatttgaagcaacatgggaaaaatatcataaaggaagtgcatttgttcctggtggtcccggatggcctggtgcttcaatggattatttaaaagattttagcattgacattgactctgaaattaaatattttttacaacaggccatagaagcagctgatatcgtagctcaaggacacaatttgcacggaaattatgcctcgttattcaattctattgatttaagcggaatagatgaaatcttattatggcgtaaatacagtgtcaactcagatgccacttcttaccactttgtcgtaagctatttgcaacgcaatggcgggggaaacacaggctatacacgttccatggttaattcttatctaatgtctgatggcctacccatctatgccagtaccaattatcaaggagacgatacatatgaacatatctttaccgacagagatggacgtatgggacaaactattttaaaaacaggagatttgttatctgatgatccaaactttgccacttggataaagaagagtgatggatacggctacttttaccgccctgaaattttcgaggcccaaaaagaaaatagtaatccgaccggatactgtctgcgcaaaggattgaatacatccggagatatgcagtcaacaaaagaatcctatacaggatgcccgatcttccgtgcagcagaagcctacctgaattatatagaagcttattacgaattaaacggaaatctaggtggcaactgcgataaatactggaaagctcttcgtgcacgtgccggtatgagtacagactatcaaaagaccataaacaatacagacataagtaaagaaaaacaagattggggaagttattctgccggtcaacaaataaacacaactctgtacaacatccgtcgtgaacgacgtgtcgagttggtatcagaaggattccgtatggcagacttaaaacgttggcgcgctttggaccaagtaaaagatgtacacgtacaaggatttaatttttgggatagcatgtatcaactgtatacaaaccctcaagccgaagacgctgtaaccccaattccccaaataacacttttagaatatggcgtaacagacaagacagccaatatttcagcaaaatccgacccatacgcagaaggaaaatatttattaccttatcgtaaaaatgctgctaatattggtttcaatggattaaactggaatacaagcaaatacttgtatcctattagtaacaagcaattccgcctgactaccgctgttccaggttctaatgaatatgaaagttctaccatttatcaaaaccccggatggagcagaaatgatggaactttacctgaaggtgaataaacaaacatagaagttttcagataacaatgtagagaaacagccctacaatcatttatggaaaggaaaaggaaaatttccgaaaagttttcctaccttcccatagcatattcacattatatgaatatctttgttttgaaaacataatcaatgtagcaatagactataattaccgatatggtgatagttttattttcttctaactaccgttttttcggtttattcttacgaactattctaggttgaaaaataaacatattatgaaaagattaatatcactattcttgttaactttaggaataatcttacctatcttagcacagcaaaaagaaatagatgtctacttagtaggtgggcaatcaaatgcaacaggacaagcttatgttaaaaatatcccagcctcttttaaaattgacacaagagtccgaatctattattctcgtttcctcaacaaaggagagggcagtgagcaatggaaccctttatgccaagcttctgaaacaaaaaataaattcggaatagagttaagtttaggtacaaagttacagtctttatatcccaagcctcaaattgcattgataaaacacgctttatctggttccaatctatatcaacaatggaatccgggaaaccgtcagaaaaatattcgtggcgaagaatatataaattttataaagactgtaaaagatgctatcatcagtttgaagcaacaaggatatcgccctattattaaggctatggtttggcaacaaggagaagcagatgcacgtgatatagctggaatggaacagtctcgccaatatagttcgaatctaaagaattttatagaacaaatacgaaaagaatttaatagcgaaaacatgttatttgtatatggaactgtcatacctatagccgcttctcgctttacagggcgtgaactggtaagaaaagcccaatttgctgtttccaacaactcaaactctgagttctccgttaataatgcgttattaattccagcagacgatttacaaatgctatataatgactatcagattcagcacctaaagatgatgtacatttaggaatatatggcattctaacattaggtgagcgttttgctgatgctatttatcaacatttaaaataaaagttcttttatttgataattacacaataaaacacaatcagtcaggaatgatgaaacctctattaatcctttacagattatgaagaaaagacttaatattttcttgctggcattccctttgtgtccagtattccagattcaagctcaagaaaaacctaacttggtcttcatcatggcagaccaatggagaggaaatgctttaggttgtctcggaaaagagcctgtcaaaaccccttgcctggaccaactggcccgtgaaggtgtgaatttcaccaatgctgtcagcagctaccctgtatcttcaccggcaagaggcatgttgatgacaggcatgtatccgcataagaacaaagtaacaggcaattgcaattctgccaacgctccctacggagtagaacttccacaagatgcacgctgctggagtgatatacttaaagccaatggataccagacagggtatatcggcaaatggcatctggatgctccccataaaccatacgtagacacttacaacaaccaaggtgcagttgcttggaacgaatggtgtcccaaagaacgccggcacggtttcgactattggaccgcttatggcacttacgactaccatttaaaccccatgtactgggacactgacactccccgggatagtttttattatgtcaatcaatggggaccggagtatgaagccgacaaagcgattgagtacctcaataaacatatagataagacgcaaccattcgccttagtcgtatccatgaatcctccacacaccggttacgagctagtgcccgaccgatacaaggagatgtataaaaatctgaatgtagagacattatgtgccaaccgtcccgacattcccgccaaaggcactgaaatgggcgactatttccgcaacaatatccgcaattactacgcctgcatgaccggagtcgatgaaaatataggtcggataatcaacgaattgaaacgtttagaattattcctcaaatccgcaactacgcgcctaatatgatacagaagcgaaaagaatctgcatcgttagtaaaaagggggcacagtgcatcgaatgtcaccataaagacatataaatgccccttaccccaccatgcgacttgaggcaatacgcaaaatcacgactataagttgtcggtgttatccaaagtcattctggaacacattggcataagcattgttgcatgaatagatattcagcacatacttccttgatgtcctgacccatttggctggcacagagatgaacttaaagacaaacgtcttgatgcggcttgttgctttgagtccgaacctcttcacgtcaagcctcgccatgatgaatttatagaagttgcgtatgagtgccataagcagaagaaacaccgtgttttctcccataaaggattttggaagcctgttccagccgaatccgttattcatatcatcgaagatgcgttccttccctccacggaggttatagaattcgacaatctctttctcggaagactcgtagtcatttgtaaggatgcagcggtaggtgtattctccttcccacaggtcgagttcgccgtctatccgcttctgtctttgaatcacaagacggtatgccttccctttccatttctcgatgagaatggaggccagctcaaactcaatgccgcccaattccactttcttccaacctctgagggcaaagatgtcattgtagagcgaactgcatcggttagcacggatatagaaggtcttgcagtgtttagcaatctcttccactatctcttcagaacacgagccgcaatcagctctgaaacggttgataataagcttgttttgttcaaacctttcaaagaacctcttcagcgtgtccttctggtggaaacggacatttgtgttgccgtcgctgttctcaatgccgacaatcaagttgccaataaccgccacgccagggcgataaccaaggaacttcttgtatgtaggcttcgcatcaaacttctcagcctctatgaactggtggtcgaagtcaacgtcatacccctcgccctctttcagctgccctgtggacaataggcaattgaggagcagtgtattcagcttgtctgccgtgttgaagtcgtaggtcttgccagtgtcggatgtgtaggaaatgttatcctgggtcagttcctttatggctctaagaatcgtgtcggcactgcatgtgcgaagtgtcggatgaagcgaaaggtggtacatcagatgagtggtgacatcctcgatgcatgagccgccacaaaaataaacgctcataagcgaacggatgatttcgctgtattgataaccatacagcctgcatctcataccgagggttgagtcgattacagatgagagtctggagtcaaattgctccattattgaaaatattcctccaaaaggagtgagtttctcggatttaattgctacctttgccatgtctgtcgggtttgatacatattttgatttgcaacactaagataggtgaaaaatctgacatggcaaattcctgagcaactttttgttgctcaggtacttaaaaagttatatttgtaatagtgttgcggaattaaggttatttaaaaacactatcgtagtattcacttctgaccacggcatctgcatgggagctcatgaacaagccggaaaagatatcttttatgaggaatccatgaggattcccgtccttatctcatggccggaaaaaataaagccgaaaaccgaccaaacaaccatgatagcttttgccgacttgtatccgaccctgctttccatcatgggctttcagcaacaaataccggaagaagtacaaacattcaacctcgcttctattctcctctgcggaaaagaaaacaactgcattgtccaaccctactattacatacagtcatccaatccagcaacaggctaccggggattgcgcaccgccacacatacatttactatccatgcaaccgatggaaaggtagataagattattctatttgacaggagatcagatccttatcaaatgaataatatagctatgcagcatcccaaattagtaaaccgactgaaaagccaattaaaaacatggctacaaaaaacagaagatccattttttaattatttataacccatgaagatactatatatatcccttctcttccttatgaactgtgtactgagtgttgcacaaccggaaatcattatacccaaaccgcatcaattgaaatggcacgaggcggaaatgggagccgtatttcattatgacctccacgtattcgacggcatccgctacggacaaggcaataaccgtatcagtcccattgaagattacaacattttcaaccccacccaattgaataccgaccaatgggtctcagcagctaaagccgcaggctgcaaattcgccgtactcacagccacccatgaaaccggcttcggattgtggcaaagtgacgtaaacccatactgcctgaaagctgtaaaatggcgtaacggcaaaggagacattgtccgcgattttgtcaactcctgccgtaaatatggtatccagccaggcatctatgtaggcatccggtggaattcactcctgggtatccataatttcaaggtagccggtgacggagaatttgccgccaacagacaggcgtggtataaacgcttctgtgaaaaaatggtggaagaactttgtacccgatatggagatttatatatgatttggtttgatggcggagccgatgacccacgaggtgacggtcctgatgtggaacccatcgtcaataaataccagcccaactgcctgttctaccacaacatagaccgtgctgatttccgttggggaggttcagaaaccggcacagtgggatacccctgctggtctactttcccagccccctgttcacatcataaacgtattgaaagccaaaaagaccaaatagcattattaaaacaaggtgatcccgaaggaaaatactgggtaccagctatggcagacagtcccctgcgcggtgccaacggccgccacgaatggttttgggaacccgatgacgagaataatatctatccattgacaacgttgatggatatgtacgaaaaatcagtgggacgcaacgctacgttaatcattggactgacccccgatcccgatgggctattgccagcaggtgacgaacagcgtttaaaagaatggggagaagaaataaaccggcgctttggcacgccattggtagaaacccaaggccggaagcaacggcttacgctgaatctgaatgaaaagcaaccggtcaactactgtattatccaagaagacattaccaaaggcgaaagaatacgccaatacaagatagaagcgaaagtcaacggaaaatggcagacagtatgctccggcgagtctgtgggacacaaacgcattgcgcacttcgaatcggtagaaaccaccgccttgcgcctcaccgtcacccaatccgttgccttacccgcaatcagctatttcagcgcctataacgtaaccctcaaataaaaaatcatgagagaatatacagcaatattcatttgtattctaatttgcaatgtatttatttgtccgaaatccttcgggcaaacagattacacgtataaaaaaggaaagtcattcaagagtacaaacgctttgtcaatgacagatacgattgatttaacttccatttcttctcccataccctataagaaatccatacccggacaaatccagactattgcctgtccggtacggttacctgggtacgtccgaggtattttcttcagccgagactcccgtccgggagattttgaatggcccaacaataccaaccggctcctaccttgggtgttcaacgatttaaaagaattaaccgacacccgctatccgggaataccttccaatgcagccccatctacgttgggagatgcattattgctggaactgacaaacggagaatacttgtttgccaaagccattgccggccgtaacagtttaagctggctgcaagtaaacgataacggctctgtcaccctatatgtatccaccttaggaaaagactatctgaaaccggaagtccctcttctactcatccgacaaggaaaagatatttattcaaccattcggcaagcctatcaagcgctgatgaaaaatacagaagccgccgacttaaaaagccgcacagccaaggaatatttcgaagctttccgctatctcggttggtgtacatgggaacattatcatgatgatataaacgaatccaaggtaataaacgatatgaaaacgatagaggcatccggcattcctatccggtatgtactgattgacgacggtcatctcgcccacaagaacaggcaactgaccgatttcataccggataaacaacgtttcccgtcgggatggaaaaaaatcatgtcatacaaaaaagaaaataaaatcaaatggatcggactgtggtacagcctttcgggatactggatgggattatcccccgaaaacggatttccacaagtcgtccgacaagccctatacccacacgccggcagccttctgccaggaacggacagcacccgcatccgttccttctatcgctactacgtcagcaccttaaaagaacaaggattcgattttctgaaagtagataaccaagcttttacactaccactctacatgggaggccatgaaagtatccgccaggcaaccgactgtaaccgaagcctagaagccgagacccatcggcaaaatatgggactaatgaactgtatggcacagaacgtcatcaatactgaccatacgtcacacagtaacagcacccgtgtcagcatagactataagaaatatgatgaggatatggcaaaatcacacctattccagtcttataccaataccttgctactaggacaaaccgtatggcccgaccatgatatgtttcattcctgcgataccgtttgcggcaccttgatggcacgttccaaggctatttccggaggtccggtctacctgtcggacgcccctcgggactttatcaaggaaaacattttccccttaattgacgaacaaggcaaactgttccgtcccgaagctcccgccgtacctatgccagaatctatactgaccaatccattatggagtggaaaagcgtatcgagtagcagctccctcaggcaacggagcaatgacattaatctgttacaacctgaatgtttccccccggcatcagcaagtccaagccattataaaaaaagaagattattctcttcggaacagttttgaaaaaatgtctgccacctccgaagaacgcgtgctgctttataattgggaatcacaaaaggcagaagaactatcagacagcagtacattcgaactcatcggatttacagacaaactgtttcatctctgccccatacggaaaggatgggcagtcattggcgtacaggaaaaatatctatccccgagcaccgtccaaactatctctttaacagagaatcggttggagctgaacgtactatgtacaggtacactaaaagtatggatagaaaattccagcaagcaagaactgagaagtatttccatagataccccccaaaaaattgtaatcgaaaaataacttataaaaccagccgatatgaataaaaaactacttgtatctttcgctctcgcttccttaacaggaatctcgacgcaagcaaaagaaaaaatgtcttcagaaacaacccaacaacgtcccaatatcatcttatttatggtggacgacatgggttggcaagatacatccttacctttctggacacagaaaacccactataacgaaacctatgaaacccccaatatggaacgtctggccaaaaaagggatgatgttcacacaggcatacgcctgcaatatcagttccgctacccgttgcagtctgataacgggtgccaacaacacccgacatcgtgtaacaaactggacgcttgaaaaaaacaaagctaccgacagaccaagcaatacaatacaattgccagactggaactacaacggagtcagccaagtaacaggaacgtccaatacctttgtcggcacttctttcgttgagttactcagacagaacggttatcataccatccactgcggaaaagctcatttcggttctattgacacaccgggagagaaccctacccattgggggtttgaagtaaatatagccggacatgccgccggtggtctggctacttatctgagcgaacagaactacgggcacacccgcgatggaaaaccctattcactaatggctatccccggcttggaagattattggggaacaggtatatttgctacagaagccctgacacgagaagctatcaaagcattggacaaagcaaaaaaatacaatcaacctttttatctatatatggcacattatgccatccacgttcctgttgacaaagatatgcgcttcttccccaagtatattaaaaaaggacttagtgacaaagaagccgcatatgcatccttaattgaaggaatggataaaagtctgggggatttgatgaactggttggaaaaaaatgatgaagcaaataataccgttattatttttatgagtgacaacggagggctagctgccgaacccggatggcgcgacggacaaattcacactcaaaacgctcctctcaacagtggtaaaggctccttatatgaaggaggaatacgcgaaccaatgattgtaagctggcccggagtagtcaccccagatactcgttgtgacaaatatcttataattgaagatttttatcctaccatacttgaaatggcgggtatcacaaactataagacagtcaaccctatagacggtatcagctttatgcccctgctgaaaggtacaggagacccgtctaaaggacgcgcactggtatggaatttccctaatatctggggtaatgacgggccaggcatcaatctggcctgctctatccgcaaagacgaatggaaactggtctattattatgaaaccggtaaaaaagaacttttcaacataccaaatgatatcagtgaaaaaaatgatgtagcaaagcaacatcccggcatcgtaaaacggctctccaaggaattagggaactatttgcgagcaacaggaggacaacgtcccacattcaaagccaccggaaaaccctgcccgtggccagatgaaatctaactcctgtcagtatatgaaatatgcccgactacattttcttaatgtaatcgggcacattccaatgtattatgcattcctgccgaacatttctcaagccaccggaatagctaattaataaattataaacaatatcaataaaatccgctaagcgttttccttaaaagccttttcttccgcttcactgattatctgctcaaccacatccgttttcttaatctcctccaaagaaagatccggagtaacggccccactgtctgaaggcttactatcagaaaccgttacctcctcctgagataactcacgggcagccttagccgcaaaaatacattcaataaaaccggaatcattcttgatttttcccaaagccacacgcgcagccatttgctgagactcttttttagaataaccggttccttttcctcccgaaataccttccaccaaaacttcactctcgaaagtaggattatatccctgatcgtgtgattgggttatcagctcaaaggtaacctcaaaacgatttttttgactccattctatcaacttggatttaaaatttacctccttacgggaaatcttctccaaatttatataagatccaataatacgatgctccatgaaatatttacaggcacgatatcccctgtctaaataaatagcacctaccaatgcttcgaatgcattgccgcacatatagctgttatgagaagactggcgggctgtatacttgatcagcttatccaaaccaatctctatagccaaacgattcaatgtttcacgctgcactattttagaacgggtgttcgtgagaaaaccctcacgctttccttcaaaccttttgtaaacaatatctgccaccacagcatccaaaatagcatcccccaaaaattccaagcgttcattattaagcaaacgccccttttcagacttcactgataaagatttgtgaagcaaagcctgttcgtagatgctaatatctttgggatagaatccaagcatcttataaaaacgaaaataagactccctatccttacgaaaaagaagtcttatcctatcttttatattgctaaacacgactattcagcatatttttttacgattacacatgcattatgtccaccaaaaccaaaggtattgctcaatgcagcatttactgtacgtttctgagcttcgttgaacgtgaagttcaagttataatcaatgttttcatcattatcaccttcctcatggttgatagtcggcggaacaatgtcgttcttcacagccaatacactggcaatagcttctaccgcaccggcagcacccaacaagtgtcctgtcatagacttagtagagctgatattcagtttataagcgtgatctccaaatacatccttgatagctttcacttctgaaacatcacctacaggagtcgaagttccatgtacattgatataatcaatgtcttccggcttcaattccgcatcttccaatgcgttcaacatcaccaatttagcgcccaatccttccggatgagaagctgtcaagtgataagcgtcggcagaagcgcctacaccggcaagttccgcataaatcttggcaccacgtgcttttgcatgttccaattcttccaaaatcagacagcctgcgccttcacccatcacaaagccatcacggcttgcgctaaacggacgggatgcacgttccggatcatcgttacgggtagacaaagcatgcatagcgttaaaaccgcctaaaccagcttcaaaaattgcagcttccgcaccacctgccacaattacatttgctttacccaaacggatatagttaaatgcatcggcaatagcatttgatgaagatgcacaggcagaagttgttgtgaagttaggaccgtggaaaccatacatgatagagatctgtcccgatgcaatatcagctatcattttggggataaagaatgggttgaatttcggtccgacagtatctttattcagtgtataattagctacttcttcttcaaaagtatgaatacctccgatacctacaccgtaaattacacctattctattcaaatcttctttttcgaggtccattccagaatcctccaccgcttctttagcagctgcaatggcatactgtgtatacagatccattttgcgaagttctttacggtcaatgtaatcagttccattgaaattcttcacttcgcatgcaaaatgagtcttgaatttagacgcatcgaaatgagtaataggtcctgccccgcttatccccttcaccaggttttcccatgtttctgcaacattgttacctacaggagtaagagcaccaagacctgttactactactctttttaattccatattataaaataaggataattacttagcgttagcttcgatataagaaacggcgtcacctactgtaccaattttctcagcctgatcatcaggaatagaaataccgaattctttttcgaattccataatcagttctacagtatccagtgaatctgcgcccagatcgttagtgaagcttgcttctgttgtaacttctgattcttctacacctaatttatcaacgataatagcttttactcttgatgcaatttcagacataactttaattttttagttaataaattgaattattttattttctttgcggttgcaaaggaataaatatttcttgggctgagcaaatattcaggcaaataaatgcagaattttgcacatttttttgttttatgtgcaccaaaatagagatcatcatgaagaaaatcgcaattttagcttcaggagaaggcacgaatgctgaaagaattattcggtattttttagagaaaagaacagctgaagtagcattggttatcgtcaacaaagcacaggccggtgtactcaagcgggctgaaagactgagtgttccgtcacttatcctcacagctcaagaatttgccgacgggaaagtactggaaacactgcaccaatatcatattgactttattgtactggcaggctttctcttgaaagtacctgatgccattttgcatgattatccgaataaaatagtaaatattcatccggccctccttcccaagttcggtggtaaaggtatgtatggttcccgcgtgcaccaagctgtaatagcttcccatgaaaagaaaagcggcatcaccatccattatataaatgaacaatatgatgaaggaaataccattttccaagccacctgtccggtattacccactgacacgccagatacattggcaacacgggtgcaccagttggaatacgaatatttccctcgggtgattgaagcgactattttaggcaaaaatctttcaatctaatacgaaaaaactgaagagctttgcctatccgataattgacagtctgcaccgacacctccagcgtgtcagcaatttctttatgggtcagttgtttatatcgactcataacatatactttttgctgttctttaggaagagcatgaagagcttccatataggcattaaacaactccgtgctataacaagaatccaatgccggcagagattttaactgttggctctggtactcttcatatacctgacgggtaatatgggaacgggtgattgaattcaatgccctgttcctgacactggtaaataagaaagatttcagcgacaagtcctctaccagcgactcacgcttttcccacacatacatcatcaaatcctgcactatttcttcagcctcttcaagagaaacatacgaggaacaaaacaaacatagcggcttgtaataagaagcataaaccagggaaaatactttttgatcccctgacctcaaggttttaataattaagcggttatcattaaggttcataggtcatttttaatttaaggttacacaaacataagtatttatttcaaaataagaaaacaagaatgagataaaatacaaaaaatataagtttttgtttagtaacccggttatgatatttgtattaataatgttgaccgacttaaagagagattaacagaaaccttaataaataaaccttgataagttaaccttaaactgaatgcctatgcgaaaaattatcaaatcaaacctattgggtaaacatacccaattatcaacaaacctattatttaatctaaaaacaaaaatctaattaagaacgaacctcaaaatctaaccttatgagacgaatttttacttttttcctgacattcctattgggaatgtttgtaacagcattgtatgcacaaacgcatacagtcagcggtactgtaatagataaagacgctaacgaacctctgatcggcgcaaacgtattaattaaaggtacaactatcggaacagtgaccgacctcgacggaaagtataccctgcaagccggcgacaaagacattctggtattctcctatttaagtatgaaaaccatcgaggaacctgtaaacggacgtacagtaatcaacgtaaaaatgacatcggacacagaaacactgggtgaagtcgtagtgacggcaatgggtattaaacgacaatccgagacactaacctattctgcgcaaacagtaggaggtaaagacgttaatgacatcaagagcgtcaatatgattaactccctgcaaggtaaaagtgccggtatgatgattacaccgaactcaaccggagccggcggttcttccaagattctgttccgtggcaataagtccatcagcggtaataaccagccattagtagtagtagacggagttcctgtcatgatgaatatcaccaattcacaggtagacagcaactacggaggccagcgagacggtggtgacgccatgtctacaatcaatccggacgacatcgcccaaatcaccttgctgaaaggtgcatcggcagcagcactttatggtgcggtagcagccaatggcgccattatgattaccaccaaatcagcacagtcgggtaaagtttccgttaatgtatccagcaacaccacaatggagagcccaatggtgctacccgaattccagactacttatgggatgagcgacaacggtactttcagctggggtgagaaactaagcagcaaagctccaaactatgcaaaaaaattcttccgtaccggatttacaacgaataactctatctccttaagcgggggtaatgaaaacatccaatcttatttttcctatgccaatgtctattcacaaggtatcactccccagaatgactaccgaagccacaatttgaattcaaaagtaggtttcaatattctgaaagacattcatattgatttcacggccaagtttaccaaccagcacatcaccaatcaggcagctgccggctatttatggaatccgctgaccggtgtttatctcttccctagaggagaagactggaatggctataaagagaacttcgaggtatatgatcccgcaagaggctgctatgtccaaaactggacaaatacacaacaacagcaattcggtaatccatattggatgttaaacagacagaccccgatcactgaccgtaaccgctatgaatttggcggaagcatcaaatgggacataactccagatctgaatatccaaggacgtatgcgttacgaaagaggagaagaacactgggtacacaatgcttacgcatccagcgtaggaaacctttatccgatgggacgcatgaaagacaaccgctatttcagtgaccaactttatggcgatgtcttggtaagctacaaccatacattcaatgatttttctctatctgctaccgcaggttccagttttacaaaaaccaaaacctctcatgtagacctatggggtgagggctcccagttctcacagcccggttccggaaacattttttatccgaacatctttactccgaacaactattatggcaatatgtccaccgtgggcaaagatgacaactggatgacccaaaaacggctgaactcagtattcgccaccgcacaacttggttatcgtgaaggcatattccttgatatatcagcacgtaatgactggtcttcggcattagctttcacagaaagctgttcattcttttatccctcttttggcggtagtgtcctgctgaacaaatttgtagatatgggtaagaacattgatctgttcaaattccgcgcaagctattctatcgtaggtaatgacgtacctgtattcatgagtaatctgctctattctctaggttctcaaggtgctatcactccccccgacaaagctccgttcagaacattgaagccggaaaaaactcattctttagaaattggttttgacggtacattcttacagaaccgactgaatatcaatctgacttattataagaccaacaccaagaatcagttcttctccgttgcggctccttacgaatcaggcttgagaaaccgttatgtaaacgccggtaatgtagaaaacaaaggctttgaattcaacatcggatggtatgagcagttcactgaccacttcagttggagtaccaacctaaacttctcttacaatgacaataagattaaagaattggtagatgaccttcccaacggactgacattgaccgatttcggaggtgcaaaagtgatcttgaaagaaggcggccactacggagatttatatgtacgtcacctgatgcgtgatgaaaacggcaagcccctgcaaaacgaaaaaggagagcctatcgtaagtggtgattctatggacgaactggaatacgcaggcaatatgaatgccaaagtaaatatgggatggacgaacacattccgctacaaggacttctcactatcattcctgattgatgctaaattcggtggaaaagtgatcggtatgaccgaagcggctctagacggttggggcgtgtccaaacgttcaggtgaagcccgtgacgccggcggtattacagtagacggagtaaaatttgatgccgataagtactatcgcaccaccggtaacaataacttcaacagtccatacgctgtagaaaactacgtttatgatgcaaccaatatacgccttcgcgaagtaactttcggctacaccttccgtaacctgttaggtgcgggcaagaacctgaccgcagccatcatcggccgcaacttgttcttcttccacaaagacgccccgatggatccggacgtatcagcaggtacaggcaatggtatacaaggtgtagatatgtttgcactgcctacctcacgcagttttggtcttaatttaaaacttaacttctaatgcttgaaactatgaaacggaataagatattaacatacgcctttttaatggcattcccaatgaccgtaggaagtatcttctcttcctgcacagacgattttgaaaaattgaataccagtaacatccaggtaaatccggcagatcttccttttgccgcacaatgtaccgaaccgatgacctactgttatcctcctcagcaaaatatgttccagttttggaccaacctgaccattgacctttatggaggttactttatgactcccaacggtaacttcaccaacggtgatatgggagagaaccggggacatagtggcggtatgtatgagaactattatctccatattttcaacaacacccgccgcatcatcgcacaatgcgacgccagtggtgaaagaggtctgtcaggcgtgatgcgtatcgtacaggcttacggaacattgatgactacagatgcctacggaccgataccttacagttccatcctgtcgggcgaaaacgaagtgtatttcgagttcgacagccagaaagacctatataaagccatgcttgaagatctgagtacagccattactgacatcagtgccatgggagcagatgaaatagccaaattgaaatcctttgactgttggtgcaacggcgacaaagacctatgggtaaaaatagccaatacgatgaaactacgcatggcgttacgcctgtccaaacgggaaaccgaagccagcaacgccggaatgaaccttaaggcaatcgctaccgaggctgcccaaaacaccttggcaacagtcaacaaggatattctgatcgataaaagtcttgagaatgaaatgtggctgatgttcaattggggtgattgtggattcaatgccaatctggtaactattatgagtggaaccaaagatccgcgccaaccattatatatgaccctgaataccggagatatcaaaaacgaagccggtactaccacagtagccgccaatagtcaatatctgggtatccgttttgccagcggcctgcctgccaaaccaaacagttggggtagcttctccggttggattcagggaaacaacggttcctcttattccatgccactgcctatcatgaaagcagcggaagcctatttcctattggctgaagcaaaattaagatgggatattggcagtgaaagtgtaaagaacctatatgaaaatggaatccatgtttccatgactaatgaattagcttatcggggggcttatgccggaatcaaagaatatccggaaggagcagtagacgcctacatcaatggaacaagcacccaaatagactatacagatcccatcaaagccgaattaagtaccccggctgtaaataaattaagtgtaaaatgggatgagagcgcaagcaacgaagaaaaactggaaagaatcatcacccaaaaatggctcgccctattccccctatccaccgaaggctgggcagaacaacgccgcaccggctatccacgcttctttcctgcattcgtcaatgaaagtaatggagccgtaaacacagaagaaggtgtacgccgcgtaatttatagcagccaggcttatgatgccaacgctaagggagtagaaggcggaatcaaacttctggaccaagaaaattccagcaaatttggtatctccggtgacaaaggcggaacacatctttggtgggacaatgctgataaaggaaacttttaaatgcaatattttaaggtaaaaactgtgatttttgtttcaataggcatttcatattaaagtttcggatagggcaggccgtgaggtttgccctatttttgtttacagcatatcacttattctggatactttgggtttgcgccagtcctataccatatcctttcggttcgttccggcttcccgatacagggcagttttttggcaattactacattcttcaaacatatcatctgtcatcatcaagcgaaagcgtaaaagtgcccaagcggtatgaataatccggctcaccgagcataattcgggaaacattcactaaaaacaatatttccggttgatttaatcgcacaaacctaccagatgtaaaaccggtgaagtggagggagtaagagtttacggcaattgccgcataagtgttaatttaacgcttaacgaactattatcataaattaaattgaataaactttgctgattatcaaattattattataactttgcgattattctaaaaaacgtttgcctattaagaacgttttttgattaggaatgacaaagttattttatatactcagtttgctgattattaaagtagcaagcaattacattagtacacatttatggtcaggtgaaaaaaaactgaagaaacgcgtattattgcaaactttgattctaacagcctgcttcctgcccactcatggacaagacagttttttatgtttccaaacaaatgttcaaaagagtaatatcagcatacacgaacaaagaatgaaacatcccgggcattcccaaaccgcatgtgttcactctaagcatatcggcattggaaatgaagataccggcaatgaccatggagccggaaaaacgaaatacaataagtcggttccatttctcgccctgaaaacaaacatgctgtttgacattgctttaataccaaacatagaagtcgaagttcccgttggcaaatgttggtcgctcaacggcgaattgatgtttccgtggtggctgtttgataacgacaaatactgtatgcaaatattatccggaggactggaaacacgttactggctagacaataagaagaaacgaaatatccttacggggcacttcgccgggctgtatgccggaggcggaaagtacgatttgcaatggaaagaaaatggctatcaaggagaattcttcattgccgcaggaatcagctacggatatacaaaacgcatttcccgaaatctgcatttagaattcaacctcggaataggagtgctgagaacctattacaaacattaccacgccaacgataaccatcagacattgttgtggcaaaacaacggacgatatacatggtttggtcccaccaaagctaaaatctcccttgcatggatattaaaccataaagtaaaaggaggtgtaaaatgagaatgcgttttatcttgctttcctttctgcttttcatatcttgcgataggcgcgaacttacctactatgaagttgtgggagtcaccctcatggcagactggagccaagccggactggagggagaagacacctatggcgcgacggccgttttctatccccaaaatggaggagcgcctcaaaccgtactgatgggcaaccgtactcacgccatcacccgtttgcccaaaggacattataacgtgatcttattcaaccgttcattcagtgatttcggtggcattgctttccgaggagagaatgctttccacaccttcgaagcgtatgccaaacaaatagaaaatcgttccgcaagcgaagttagcactacctcacccgaaaagctggcaacctgcgtcatcgagggatttgaagtgacggacaacatagaatgctcactgcactttacccctaccgagctgacaagcacagtgaaagtgcagattagcatagacggactgaacaacataaaagatgctacttgccgccttggaggcatccacgcctccatattgctgcacaacggccaatgcggtgaaaagatgattacacaggaattttccataggaaacccgaccttccacgaaggatctttcaccgacggcactcttacaggcgaaatctgtgttttcggatttgacgaagaaaccgaccacagcatgagcctgagtgccaatctagtagacggaaagactaagatagaacaaaacttcgataaagtgagtatctcaaaagacacggatgaaacaggtgccatctacctacatatagaagcaaaaacacccggacgaatacctgatgtagaacctgaaaaagatcccaactccggtttcaatgcagatgtaaacgactgggggaaagaagaaaacacagaattgcctttgtaaaacaaaagtataatactaatcaataaaaaaatgagaacaaaacatttattaatggcgatagcaacgttgctggtggcaggttgttcgcagaatgaaattacggaggtcagaacagtcggtaatccagctgtcggattcgatgtctacacgggggtggcgaccagaggcacagatgtttctaccacaactatgcaaggaacatgtgacgagacccattatggcggtttcggcattatgggatattacacagggagtaaaaattgggatgaggctaaaggaaccgtaactccatcttttatgttcaatcaaaaagtgacttatgacacaaatgcaaatgaatggacttattccccgacaaagtattggccgaacaacacgacagacaaagtgtctttctttgcctatgctccttatgagagcaatgtatccggaggccgtgtaggaatcgtgacttcccaaattgatgataccggcataccttctattgatttcacattgaaagaagcaaccaaaattgatgaaatggtagacttggttgtagctgaagaattaaacaaaacagcacaagatgaggccatacaattcaacttcaggcatacactttctaaaataaattttaaagccaaattaggcgctgactatagcggattggacggaacaagcagcttcatctatatcactcacatgtggataataggcaaaaagggagggagcctgtcttttgatcagactaataaattaaccaacgaaaattctaaattttatacgaaggcaacatggaaagaccttcattgggactatgaaaatgctacaatcgctgaaggcgattacagcatcgaaaagatcatgaaaatggaagagaaggagatcacggaaatatgggccgatggtacggaaaaatccattaaaggcatcattctgaaaaaagggaacaaagaaactccggtagatttattcaaaaaagatcaatacctgtacttaattccaatcaacgataatgctgaagaagttgcggcagacggggccggcggatgtacaagtggcgatattcagattggcttccattacgatattgtatccaaaacggcagatagcagcgatgacaatcccaaatacgcagtaagccatttggaaacagcagtttcattacctgccaatcacatgaaaagaggtaaattttacacatacactttcactatttctctgaaggaaataaaagtaagtgcggctaaagtgaacgactggggtagcgttaccggtaattttgatgtaaattaaatattgcataagcccggataaggttgaatgtccttctccgggcacaccaaccgacaaattgaaattgacacataaataaaacaatgagaagattaagaaagatactcttttttataatcctttcggcatggacactcacgtcttgcgaaaaggatacaggcacagaaaccgtaaatgttcccataggcttctccaacaatgtaacgaccgccacaagggccagcgatataaacaacgacaatcttacctccatcggagtatttgccagtcttacccacggcaactttgacgcaacagtttccacccccaacttcatgtacaatcagctggtggaaaagaaaaacggcacatggcaatacactcccctgaagtattggccaaacaatgattcggataaaatcagtttctttgcctatgcaccccacaatgccacgggcgttacgccgagcaacgcaatccaaaagggttatccttcattcacttacactacacccacagcagaagccgaccaggtggacctgcttgccgccacccccattataagccaaaacgggggcagtgtggatttcaaaatgcaacacgcacttaccaaggtggttttcaatgtgaaaagtaatgacgacataacgggaaaggtaatcacagctttctccattacgggagcaaaaagcgggacactggcttttcatgtgccggcaaacgatgacgacaagggtttcggttggacttatccgtcaacggttactgccgaaacatttaccgctaccacaaaatccctgtccgtaccggataaaagtactccggaggaagctatgctatgtacctacttcctgctccccacaaatataggaaacacattcaacatcacctatacatacataggaatcaaaggaacgcaaaccgtcacgttgaccaatcagcctttaccctcactcgacaaatggctgtcgggggctttcgtgagctacaccatcggcatagacaaaaaagtagtcactgccacaacagaaagtcatcccacatgggggaatggcggtcagggatctgtggacggaacaattaattgaatctgaaagaaaaactatatatacatatgaaatactcttttatcgtcacggtattatgcggcctccttgtcataggtggcgcatgtacgcacgaaaacgacccagaggatggcaaaagaactaaccagacgcccctcatcgtgaaagccacggcaagcaatttcaatcatctctccatatccggctccccctttgcacgcactcccttggaagacggagccgaaacgcagtttagtgcaggagacgccatcggcattttcgccgttaaaaataatgcgatagcagatgccgtcaacaacatcaaactgacttataagaaaacaggcattgacacaggtgagtggactcctcctgccggtacttcgctctattggaatgaaggtatggactatatcgcgtactatccctacaaggaaggtgtcactatagataccagtaaaaccatagatgaaatcatgacctcactagtggacaacgaaaagctgaaacccggagcggatcaatccggttccgatgaatataccgcctgtgacctgatgaccgccgtaggaaaggtcagcgaggaaaccctgacttttgaattcgagcatcggttcgcattactgatattgaagccacaagcgcatttcaaatatgttccacccgcggatgcagtcttcacctatcgcaacaatggaacattatcagacctgactgtcgatgtcacagccaaaaacgtgaaactgaacaatgtcactccctgcaaaatggacgacggcagtttccgtgccattgtcctccccaccaagacagcgacagccatagccgggagctattcaataaccgatgtatcaacttccggcacaagcacagacaaaacactgacctactcattcaccccctccacagcgttcactgcaggatgctgctacaccttagaggtgaaaagcccgttatctgccatagagaaaacacgggaactcactcccggtgattttgtttttttcacggcaaacaataaaatagagattttccccggagatggagtctttgagggcaacacaatccccgactacaaagatgctgcagggatggtaattacttgcgatccggaaaaaatgaccgatccggaatgcaataagaaaggatggacacatgcctatgtgatgggattggaaaacataggagtggcaaaatggggagacaaggtagatgaacccgatatccctaatatgacaacaaacgatttactggagaataacatgaatggctattctgaaacgcaagtaatattgaatacttatgatgatactcaacttaagaatacatacaaagctttttttaagataaaagattatcggacgaaaaataaaataccgaatgacgaaaatatatgcagtccgtggttcatgccgagtataggtcaatggttcgatctgctcataaatatagggggaaaatctccgagaacatttgaaagacagtctgcatacagtttagaaactctgatatatggaaccgaaacaagagaaaaaataagtaaacaattagccaaagccggaagtacgttgggagaaattgtcggcaacagaaacattttcagatgcaccaccgaatccaatgtagcgacagatgcctggattcttatttggcactttgagatgctcgatggcgttttttgggaaagagtagctgtcaaaacttacagcaagctttccgattccggatataacgtccgtcctttcttcgctttttaactatcaaaaacgtaacttcgatataagagttatcgtataactgattaataatgaattaattcacaaatgtgctaatatgccaatgatcatgcggaatagagcgcagccaattggcatattagcacattgacacattggcaaattattcaaaaccattctgcaacgagcgtaccaacgatgccacccgtgcataagggggggcttgtaccagctatcagcccgtctggtattctattccataaccgctttatgccctttaaggctctgttaaggcggatagcctgccacagctttgacataaagccatgcttttaatgtgccttttctggagacttctcgggagaaagatcccatatcccttttaatcggtatgcagatactaaattccgaagccggtacagtgaacgctaatcacattaactaaaggctgttatcatacagccaccccattccatccattattccaccttagtgaaaatgccatttcactaaggtgaactacttgcttcacccaggtgaaagaagcgcttcaccaaggtgatatttcggatgccgccggatagaaacacaaatccgcctatgctcttgccggaaaacagctgcagaaaagacacacgcatgaagaaaacctgtttctgccggatgaaaagcaagcagaagcaggactacaaaccgtttcagtggaattcgaaaagtattcgcacggcattatattgatttacaacaagatatggtgacagaataaaataatataaaagggaaaaatgttttttgttcaagatcgatatcccttacactgactatgaaattaaagacttttcacctcgtatcgcttgactaccgaaaaaaaagccgtaagtttgcctctgtttacataaaaacgtaatatgaaactatcggcaaaggaatttgaataccaatttcgctgtctttaccgtccgctgaatatgtatgccctgcgctatactgaaaatctggatgacgcagaagacatcgtccaacaagccttctctgatgtatgggaaaagcttgtcggaggcacatctattcaaaatctgaaagcttatatgtaccaaactgtacgtaaccgctcactcacactggtaaccaaccggcaaacacactgtgaaacaaccgaactgacagacttggaagatttaacagaagaagaacgcatcatccggtcagaacgtgatgctcgtttatggacagctatcgaccaccttcctaccgaacggaaaaagatctttctgctttccaaacgtgacggccttacttatcaggaaattgccaccgagctgggtatttctataaaaacagtcgaacatcaaatcagtaaggcactgaaaacattacgagaaacagccattaaaatatatacttttttcttcggataaaaaaatcggcaagcgaatagggggattttgtcttttccctgtcttaacaataaaaagaaaaaagatcgcatggagaaagaagaaaaagatattcgttttgtagcccggttctatcgggaaaacaggctggacacgacacaagcctggcaaaaactaggtatcggcaaacagaaaaataattctatcttattatatagactaataactatcgccgctgtcactttcctgatagccggattcagttggtggtggatatacgacaggcaagattggattgtcattgcctcatccgcacacgctgtcaaagaagtcacgcttccggataacagccatattacgctggcagagaattcggccttacagtatgaccgcttggcatacggcaaaaaaaacaggaacgtcactttaaacggaaaagcatatttttcagtcacacatcaagaacaatgtcccttcagggtacagaccgaactggcaaacatacaagtactaggtacgcaattccaagtaacggcaaatgcaaatcaaacttcggcaaccgtagagtctggaaaagtccgtttttataacaaagaacaaaaagaagctatcctgacaaaaggcatgtatgctttcattaaccaaaaaggacaaatgcaaatagaaaagcaaagtgatcccaacacttttgcatggaagactcacgtgtttgtttataatgaagcccccttgaaaaaggtagtaaaagaactagaagaagtctataaggtccatatcggcggaattccacaaaaagagtactatttgaccacgacctttgacaatactccgatagaagacataattgaaatcataaaccaaacactagatacaaaactagacataacccaatgatgcaattccattctaaattttcttttcttctgctcctttgcctcatgcacatttgcattgaggcaaaaggaacagaacatgacgaacccctcgtaacattagatatgaaacaaacccccatccgtaaagttttagcagaaatcacccggcagacaggtgtaaccttttcgtatgaatcctctttaacaaaacatctgttaccgatagatataacaataaccgcccagccgttatcccactgtttgcgcattctgtttcaaaaactgtccgtagaatatatacaatcaggcaaatacatcatcctcaagaaaaaacagaaaaacattgtaatcagcggcttcatacgagacaaatcctcctcagagtcccttataggcgcctccatctatgatgctaaaagccatcaaggaacaaccagcaacgccgacggctttttcagcctgaccctggaagccggaaacgatgtatacctgaacatctcctatgtaggttatgacagtttccaccgttcattcatacaattggaacaagacacgctgcttccggttctgctgaacagccaccagcaattagccgaagtagtagtgaccggagaatatacctcttctccattagtccaaacatccgatatgggacatacccgtctcaacaaagacctgatccaacaaaccccggtattattcggagaagctgatattataaaaaccctacagaccttgccgggtgtatcggcaggcacagccggattggcaggaatgtatgtgcggggcggtaatggagacgacaatctttatatgatagaagggaatccgttataccagatcaaccatgtgggcggtctgttttcctccttcaacgccgaagccgtaaaggatgtagaattctttaagtccgccttccccgcccgttacggaggaagactgtccagcgtagtcgatatccatacaaaggatggcaacatgaaagaatatcacggaagcgccatgctgggactgacctcaggcagcctgaatctggaaggtccgttggtcaaagaccggacctcattcaactttgcattacgccgttcatggattgacgcgctttcggccccaaccatcgccatctggaacgctaccagaaataaaggagaaacccaaatagtggcacgatacgcttttaccgacatgaactttaaactcaaccaccagttcaatgaccgcagccgcggatatgccggtctttactggggaaacgattttttgaagggaggagaaaaaagagaaggtgacaacggatatgaaagcagaaacaccggcagactgcgatggggaaacatcatggcatttaccggctggtcatacgtattcaacaaccaactcttcggtaatgtgaatgccgcctttacccactactcttccaccttgaaaggagactactaccaaggaacagaagccaactacgtatcacaggaaagttcaacccagaaccgcattgacgacctcagcatacgagccaatttcgatttccgccccaatgcttcccatcagttgcatttcggcactcattatatttaccaccgttttcatcccgtagacgaaaaatcgtatttttccaatggtatgaccacccagaccagacaaaacaacgacactgccctacctgcacatgaattaggcatatatatggaagaagactggaaaatgaacaaaagaatacgtttgaacgccggggttcacctcggactatacaccattgacgggaaaacgtacacttctctggagccccgtttttccagtcgtttcctgatcaatccgcaactcagcctcaaagcctcttatacccggatgagccaatatgtacatcaagtcaatgaaagctacatcaacctgcccacagacacatggataccggtcagccgcaagctgaaaccgatgcagagcgaccaactggctgtaggagcttattacaccaccggcaacaaaatctactctttctccatagaaggatattataaatggatgaaacatctgatggactataaagacaactaccagtttctccctccttccaccagctgggaagataaactgactcaaggaaaaggacgttcttacggcgtagaacttattgcccgcaaagaaaaaggaaaaataaccggatgggcaggttatactctaagctggaatgacagacagttcactgagataaataaaggcaagcgttttcctgccaaattcgacaaccggcataaattcaatataatagccaattggaaaatcaagcccaaactggagttgaccggaagctggacctacgcaaccggtaaccggctcacggtttctttcgaaaactaccaggccgtttctccccaacatccgtttccgggaggcagcctggttcctccttatatagattcaggcggattagactattatacggaacgtaataatttccaacttcccgcctatcacagactcgacttgggcatcaatatttaccggccaaagaaaaagaaccggatgggaatatggaatatcagcatctacaatgtctattcctacatggcacccgtcagcatacgcaaaggatggtggtataataacgactgcttctataccctgggcatagttcccattataccatcagtttcttacacttataaattttaaatgattatgaaacatctgctatatacattacttctcggagtgttccttacctcctgttatcgaaaaatagatttggacgaatatcgcactacgcccaaaatggtaataaacagtgtagtatcccccgacacagtggtaatggcctccatcacccggacctggttctatccagacaagaagccttatgtcaatctccctcacgcccatgtggagctctatatcaacaatcaatacatagaaaccatgcaatggaaaacactgaataatccccggaacccagaccagccggataccttattcctttcaaatacaatcccggcagaaggagaccggataaaaattgttgcatccacccccgaatatggtacagtaacggcagaagatatcataccaaagaaagtacctataaaaaacgccagtcatacaataaaaaaaggtaacggagtttatcaaggaacaatttccgactattttgaaatatactatgaagtcacgtttgatgaatttccggaaaagaacaattattatctggccaaaatcacacaaataaaaacgggctattacggttactacgaaacaaaaatagattatatagatcctgtattcaaggaacaggatgccatattggacgaaagtatggcattcaacggattggaaaaaagaggaggagccctctttaccgaccaaagcattaacggacaaacctatactttacaaataaaagagacaacggcagagttagacgaaacagaacaaagaatcatttccatctattccctttccgaatcctactttttatacctgttgtccttacaaaaaattgccggaagcacgttagaaggaggcttgggtaacattggactagccgaacctctacgggtttacagcaatgtggagggaggaaccggcattctgggcggcaaccaacattcggaaacaactataacattgaataacccatctaaaaaataattgattatggatacattacaacaagctcccgccttatggtattggagcgaacccgcatcgggatacagcattgaagattgcgaacagattgtagcagaagagatgcaaacagcaaaagcagactaaaagttctggccaccgtaggggtacattgaaatgtccccctacggtaaaaaagaaatttcacgcctcaatggataattcccccgcaaatgttcaaattcttcgggatgccgtttcaatgcatcactgtcacgagtcggatcatacacctgtagaaaagcctcttccggatcagaagaataatccatatacggcaaagcgggcggtactattttaaaatcagcctgtatatggaagaagttacaaagctcctccaatgccatccgtgtagcattcgactttccgtcagctgaataccctgctatatgaggggttcccaaaaaaactttctgcaacaaatccgggtgaatagccggttcattttcccacgtatcaataaccgcatcacgtatccggcctgtcttcagcgcatcaagcaaagccaatgtctctattacttctccacgagaagtattcacaataaaaggtttccgttgcaaaccgacaaagaaatccgcatccgccagatggaacgttttatatttcccattcctgttcagcggagtatgaaaggttattatatcacattcccgtgccagcacagacaaatccacaaatcctgtttccccccggtccgcacgtggaggatcattcagcaagacccgcatccccaatgcctccgccatacgttggatacggcttcccacatgtcctaccccaacaatacccagacagctttcttccaatctcacccccttccggcgtttcaacaataataataccgaatgcaggtactgctccacactgccggcattacaaccgggacaatttttccatacaattcccgcctcatcacaatagtccacatcaatatgatcaaagccgatggttgcagtagcaatgaatttcaccttgcttccttccagcagttcgcggttacaacgggtacgggtacggatcaccaatgcgtcagcatcccgtacatccccgacggtaaaaccactgccgggcaaatacaccacttcatcggctatctgttcgacagcttcatgtatataaggtattttattatctacaattattttcatctttcaaaaacttgcttgggaacaaaggtagacacttttaccgaataataattggctgattagaaaactttgcatagatttgtacattcaataaaacagctgttatgtccaagattcttgtaatctgcttttcatccatcaataatgtggcaatggcaatcccggtcattcactcattggctacgcaatatgcccagcatcaaatcatggtgctgagcatagacacattctcccccttattcgagaatgtgccggacaatgttattttccgtggagcagatttcagaggagaacatgccggattaatgggtctgggatggctgtacaatgatttaaaagaagaaaaatttgatgccgtagccgctttccagcccacattccgcagccgttttctttgctggcgttttcgtctggcaggcataaaagcagcccacatcaagcagaacaggcgggaactgcaaaaactgatacggcggaaacataaaatatatacagagcaagactccttttttcagcgctgtgcccatacgctcagtcagataggttaccccatccggttaagtttcctctcccttttcggaaagaataaaggcaatatttccagcctggcgccgttaaccggtgagaagaaccaagaaacatggattggaatcgctccctttgcaacacatgtaggcaaaatctatccgttgtcaaagcaagagcagatcctcaaacatttatctgcacgcgaccatacaaaaatcttcttattcggaggcggaaaaaaagaaatcaaagtattggaagaatgggcccaacatttccccaatgtcatctcaacagccggcaaactaaccataaatatggaattggccctcatgagcaatatggacgtcatgctggtaatggatgccgccaatatgcaccttgcatcactagtgaacatcccggttgtgtccatttggggggcaacgcatccctgtgcaggctttgcaggatggaatcagtctgcggcaaacataatacagatagacctgccctgccgtccttgttccttatccggagaaaagcactgttatagaaaagattatgcctgtctgcaaggcataactcccgaaatggtaatagaacacataaacaaagtcatcagttaaatgaaacaaataaatctcatatattattccgttttctttttgtggtatttgctttcgcttctacccttacgattcttatatttcatatccgatcttcttttttatccgctctattattgcatccgctacagacgtaaaatcatacgcaataatttatcgaactcattccccgaaaaagatttaaaagagattgtccaaatcgagaaacaattttactctttcttttgcgactatatagtagaaacgctcaagttattctccatttcaaaaaaacaactgatgagaagaatgacttttgaaggactggacgagatagtggaaaacatgaacaaaaagaacaaagacttctgttttatctatttagggcattattgcaactgggaatggattgcatccttgccttattggatttccaaagacatatcctgcggacaaatctatcatccactgtacaatcaggctttcgacaaactatttctaagattacgcaaccagttcggaggcgaatgcatccccatgaaaacgactttgcgccgcatcattgaattgaaacggacaaagcaaaaggcaattatcggatttatttcggaccaagcacccaagtggaacagcatacatcactggactgaatttctaaaccaagaaacaccggttttcatcggtacggagaaaataggcaagcaagtggacgccttgatttattatgctgacataacacgggtcaaaagaggatactaccactgccggctcaaaccattgtgcgataccccccggcaagtacccgattttgaattgaccgatttgtttacccgagaattggaacaaacaataaaagcgcatccccaatattggctctggagccataaccgctggaaaagaaccaaagaagagtggctgcgcagacaacaggaagaaactaagtgattatggaaaaatatgattatttgatagtaggtgccggtttgttcggcgccgtttttgcccacgaggcaaaacgagtagataaacattgcctggtaattgacaagcgcaatcatcgcggaggcaatatctactgtgaagatatagagggcatccatgtacataaatatggtgcacatatcttccataccgacaataaagaagtgtgggactatgtaaacagctttgtcgaattcaaccgatacaccaactcccctttggcttactttgacgggaaattatacaatcttcccttcaacatgaacactttttatcagctgtggggagtaaagaccccggcggaagccaaggccaagatagaagagcaacgtaaagaatttgaccatatcaccacccccgccaacctggaggagcaagcattaaagctatgtggaaaagacatttaccatcgccttatcaaaggttatacagagaaacaatggggacgttccgccaaagaattaccggcattcatcatcaaacgtattcctttccgtttcatttatgacaacaactatttcaatgacagctaccaaggaatccccaaaggcggatacaacgcccttatcgatgcgttactggaaggaaccgaggttcgtctcaacaccaattatttcagcaaccgcaatgaactggacgcattggcagacaatatcctgttcaccggatgcatagaccagttcttcgattaccaatgcggacatctggaatacagaagcctgcgctttgaacataaacagctggaaacagaggatttccaaggcaacgcagtagtcaattatacagaacgtgaggtaccctatacccgaatcattgagcacaagcactttgaattcggcacacagcccaccactgtaatcacgtatgaatatcccgatgatttcgcgccgggcaaagaaccttactatccgataaacgacaagcggaacaccgaaatgatgagccaatataaaaaactggcctctgagcggaaagacgttttattcggaggccgtctggcacaatacgcatacgccgacatggacgataccgtagccgctgccctcgccttatgcaaaaagacatttaaataaaaggaaatccttggactccccaaggttttccgctaaatttgcatgatattcctaaattgacaaacaatatagataacaaaccaatgaagtgccttcatatcataacacccgtaaaagattcgattgactccacgcttgaaaccgtaaaagcaatcatggaatcggatattttggttcctttcacttacactgtctataacgatttcagcacggaagaaaatacccatcggctggaagaggccgcccgtcaatggaattttcgtctggtcaacttatcagacctgaccgaccacccctctcccaactatctactggtgttacaaacagcacaaaaagaagccatcgaagcagatgcaggattgctgattgtggaatcggatgttattgtcaaaaaaaacacattgcaatcactatacaatggagcattgcaacagaaacaatgcggaattgcagcagctgtgacaaccgatgaaaaaggcataatcaattacccctacctacacgccaagggacacgagaatcaagtgtacccggaaaaaaagcattgcagcttctgctgttcactactcacccccggactgctgaaagcatttgactttcagacattagacccaagcaagaactggtatgatgtgaccatctcgcacgagtcactgaaacgaggtttccaaaactacctgttcaccacgttgcccgtatggcacaggccccatagcagccgtccgtggaaacaactgaaatacaagaatcctttaaaatattactggttgaaatataccaaaggactagacaaaatttaacactattataatgatatgagcaagacagagcgtttgtttcatccccgcaccttagtgattcaccctgatttcaaaaatctggaagaatttatagtatccattcccgaacgtttccaaaggaatgaaggtactgttattcaccaagggcgcaatgaattgcggaaaatggaatacaatggcaaagaatatgttatcaaatcctttcacagcccccaccttatcaaccggtttgtatatggcatatttcgtccatccaaggcaaaacgctcttacgaccatgcagaaatgctgctgaaaataggtgtaggcaccccgcaacctgtgggatatatgaatatacgttcagggctgctgttcgataaaagttattatatcagcctcctctccacctgcccctacatttacgacaacctgttcacacagcaatttgactacgccgaggaagtattccgcgccataggcaaagtgaccgcccgtcttcacgaacacggatacgcccacaaagactacggacgtgccaacatcctgtttcagaaaactcccaatggcataacaatagaaattgtcgatttgaaccggatgtacatcggccccatagatatgaagaccggctgcaaaaactttgaacgcctgccggcaactccacaaatgcaccgatggatggcagaagaatacgccaagacacggaactttgatgtggaaaaatgctttgagctcatgagagcctatagaagcgtacagccgggaaaaatagataacctttactaaaaactaaatgcatcatgaacattatagccgtagttgtaacctacaaccgaatggaacttctgaaaagaaatattcgttgtctgcaacaaaacaagccgatatcttccattgtaatagtaaataacggaagcacggacggtacaacggaatggcttgccgcacaggaagggctgacagtaatcaatcagaccaatgtgggcggtgcgggaggattctatacaggcatacaatacgcttatcaggcgggtgccgactggatttggtgcatggatgacgatgtatttccgcgggccgactgtctggaacaactcttgccgtataccgacaagaaagatatcggcatactggcccctcgcaggttgctcgaaggagaaatattcacccatgacttccaggcatacaacctgagcaatccttttgtatccatgtacagcaagaaactggcaggacggcacatcacctcaccgacagaaattacgggaacagctttcgaaggtccgttcatccgccgcgaagtcgttgagaagataggtcttcccaataaagaccttttcattttctgtgatgatacagattactgtctccgcaccatacgggaagggtacaaaatactctatatacctgatgccctgatggataaagagaaattcttctccaacgacacatggaatgagcgaagcaagaagaaaaagtggaaacgcttttatcagatccgtaattcaacttatttaaaccatcactacggacgcaacatagcagtgaaatatcttcgcggcttcaacggagtaatgggatatattttcatcgcgttgttcaccagtccgtttgcaaaagcctatcaatggaaagatataccccgattatggaaagcctattgcgacggaatacatgaaaaacttggaattatgagttaaaaaacggcaacgctcttaccagttaatgtttcataataaactagcatttatatactatatttacagaaaaagagtaaatttgttatataattaaatatcagaatattatgagaaaactaaggattacgttatctattataatgagttcagaataaaacaaattcttttgacaatagtattaattatctctaatatgacaggtagaaatcaataatcattggttatttatgagcaatttattactatccaaaatagggcacgttatatccgaatttcctttggcttttaaacaaacgaaaaaagtcaaattattcatgacattgctggtaaaaaacgaagaagggatgctggaagagaatctacagttccataaagcgatgggagtggacgggtttatcattactgataataactccacagactcaactccggacattatccgtaaatacaaacaaaaagggtggattaaagaagtgatagaagaaaaggctaccaactatgaacaaaaggactgggtagaccgtatgatttggaaagccaaaaccatttataaggccgactggattatcaatgccgatgccgacgaattatggtatgcccctactggcaatttgaaagatgaattatatgccaccaatgccaatgtgctgaattgtgaaatgagaagtgtctatcctgaagaagaaaagcccttttggcaatgggataagactgtaaaagcggtaaccgaacctgaaaaatatgacttgtcactctattcgctgtttgagcgtcagaacaaaaaagtcattcaccggactgccggttacctgcaaatttcaatgggaaaccataaagtaaccatgttcccacaaaactctgccgacagccatatccatgtatatcattacaatatacgcggcaagcagcagtttatggaaaagatgataaatggcggcaagcaactggagcaacacaagggcaaacacggaggtcgccactggcgctacttctatcagttacataaagaaggaaaactagaggctgaatatgaacgtgttatcggcagtgcttattttgaagcacttcgcaaagacggattcattattccggatgtaacgattcctaatttctttaaaaatataaactcataacctaatgatgcatattgcacttactatagattccaaatttgttcgttattgcgcagtcacaatagtttcaatattagaaaataatgatcctaaagatatcatgctacatattgtatcagggcatctacccaaagaagatattcttactttgtcacaagtagcagaaaaatatggaacttccatagctttttactatatcccacatgaaaaacttcaaaattatgaagttaagtggcaaaaacaacgtctttccatggttgtcttctatcgatgtgtgttggcttcgatattaccttctacaatctcacgagtgatttatctagatagtgatacacttgttttaggatccttaaaagaattatgggataccaatctaaaccaattagcacttgcaggggtacaagatactgtcagccctaatcctagttactttgaaagattacaatatgctccctcatacaactacataaacggaggtgttttactattaaacttagcatattggcgcaaacataatattgagcaacaatgtataaaatattatcaacaatatcccgatcgcattattctaaatgatcaagacatattaaatgctctattatacgaccaaaaggtactaatagatataaagtggaatgttcaagacgacttctatagaaataacagatatacatcccctgcgtggaaaccatcatacacagatgccattttacatccaatcatcttacactatagtggacgtaaaccgtgggcataccatgctatgcatcctttgcggcatctatttttccattaccaaaggctgactccatacgatgattcagccaaacaaaagaaaataagtacacgtatctatagattcattcatttactgccatatatattaggccttaaaccaaagaaatatgtaaaccttaaaaaaataagagaaaattcccaaatcactaaattataatatattcttgtgggaagaatttaataaaccggtaatgctagccattcctattcaagaaatataccaacgaaacagattacaataaacaaaactattttacaaataatagtattcgctttctttggatctcgagcgaacactattatttgaacaagaaaaaaaatctacctatatctttttaaaaccgacaatatttatggataaacatatcctaaaataccaccatactgatcacctctctcccttataaatcgatctacttctgctttatctgttaaataatgactatctcgacctttaggataatataaactataaacaggaatagtattaacttcattccatgtataaatatagccaactataccttggtattcatgaccttcattttggaatttacgtacttcagcccatgaagtaatataatgtgaattcctccctttagaccaatacattctataaagaggcagagtaccaggttcctcttcagcacatatatacccaaaaacgccggaatattcatgcccttcattcttgtaccgaagaacttctgaccaagaagtacaccagtgacaatttacacccttaggccaatataattgatataatgtaaccaacttaataactgatatttttttactatttatatatttctctactgctagctttaaatcagccttctttactgggtctgaaaccaaatcataaataggataagtagcattccaatcaacatcaaccaaccgcgaatgagtatcgtctacagattgtgaccatgcacctatattgatagtagtcgtgggaccttgattaggagccaaagttatagtagtaccagaagtagtgcctcctacacattgaatagtacatgtccaatctgaattctttttattagcctcggttattgtagttgtgctccaagtcccatcaaaatcaagaccgactttagacatattatatttcgccccagcacttactgtctgttttttctctgtacctgtattttcttctataatagccgatttataataagctatataagaacctcctactgtaatattagtaagtacatgggtcccatattttgcaacaatttgatctgctgagtatttacctaaatcagacacaaagttagaagataaatatcgagataaaagctcaacatctgcatctacaaaatattttctttgtttctttgtcacttctgctttagcaaaagaatatttagaagaatatgaatatttagaggcagacttaaatccagcggaaagagtgccagaaaagaatccttcagcatcttttttaatatccatggctgctacagatcccttaaaatttgaatcagttatcacattctgaagaaaagattgggcatcttcacctgcaacaattttttggtctatggttccaatgaaaggattataaaaccgatcaccattatctcttattaatgctttgacatcaataacttgtaaacgagtagagttctcccctaaataatcctctgttatatcatatccaaaccccagtacatcatagacaccatctcctgccatacgggaactcatatcttctgtttcattcctttgcatttcacaaacgtcataagtatttgtacaagaaaccagcactcctacaaataaaaaataacacaaatttattttcctcataacagtacattttaaaaagttaataaatcaagttttaataagcattgttcatatcacatacctgtgctagaagctattttataagaaaaagaatattgatattttttatctccaacatgaatcaatcttcaaaaggaaatacatatcctacaattttttgaaaatcatccgtattaaaatgaagtcctttccattgaacagaataactatgatttatatgttttgcactataatattcatataaaggtactgttcctaaaacctgcgatttataaatataacctgttattctttggtatacatctgtattactctgattacctctccatacagaacttaaactttgatttatatattttgcactataatattcatataaaggaacagttccctccacttgactcgcacagagatagcatgttacaccttgataatcatccgtattaaaatgcgttcctttccactctgtaaaataactactatttatatgtttggagctataataattatataaaggcaacaattccaatatctccagtttaaaactatcaatgtatttttctactgcattttttaatgctactttttttgcaggatctgaaactaaatcataaataggataagtagcattccaatcaacatcaaccaaacgggaatgagtatcatcaactgattgtgtccatgcacctaaattgatagtagtcgtaggtccctgattaggagataaagttatagtagtaccagaagttgttcctcctagacatttaatatcacacgtccaattagaatttttcttattcgtttcagtaatagttgtagtattccaacttccatttgcatcgagccccacctttttcatattatatttagcaccagctgttacagtcttcattttctctgtgcgattggcttcttctacaataacagatttataataggccctataggaaccacccactgttattttagtcagtacatgagttccatacattctaactatctcatcagctgagtatttatttaaatccgctataaaatttgaagataaataccgtgataaggtttcagcattagtatataaaagatattgtctctgtttctttataacttccgctcgcgcaaaagaatatttggaagaatatgaatatttagaatcagacttaaatcctgtagtaatactcccggagaaaaatccttttgatgtatcagacttacccattgcagctacagaaccagaaaaatttgtattacttattgtttgctgaagaaaagaccatgcatcctcaccagcagtaactttttgttctatagttccaataaaaggattatcaaaacgtcccttattatctctaataaatgcttctacatctaaaaccggttgatgaacagaagcttctcccaagtagtctgatgttatatcatatccataacccaacacatcataaattccgtcacctgccgcacgtggcataacctctttttccgagaaattctgtaaatcctcaaaaccactactgtctgtacaagcagcaatgaataaacctaaacaaaggcttaataaactaattcgttttttcataattatcacatttaaagttagtatacttttctcattttcacaatgaacaatcttataattccatcatgtcattttccactaaatgccaaacaattatacgccaaacaattttagtattcattccacaaacaaagatatctcaaacagagattataaggagtagactggcaatatacaaaaaaacattgaatttacaagcgaaattgtgatatttttgcagaaaaaaaagacaatcaataatataggctctctatctataaattcttcctaataagggagtgaatgaatatgtatagcagtcagtcctattgcataagctttttctatctccagattaaacctttttatatgggtgtattctatctccatagcctttggagttatctccataagctttggagttatctcccaagactatggagttaactccaaaggcttgcggagatagaacaaacaggaagaaaacccttaaccatacagcaagaaatgtttagggatgcggataagatattttaaggatgaatctgattttaaaaccacacaattccttacggatgaaaaaactccccaatgtccttctttaaaaaagtgaaacaatatatgacaggaagatatacatctgactatatatacaggacagaaatatgaagtgagggcatatatgcacccaaactttttatgaaaatacaggcactcttgagaaatcgcaagcggctgcataaatgaaattaagagaacaacctaaaattcctgaaaaacgtagtaaaggccgcccttttattaaatcttcccaaagccatagataccccccacaaaccacatatattataatgtttatgcaatgaaatacgaaggatggtatggatatagcattgcaatgcattaatcagctccggatcatccacataatcggaaaacatattcctcatccatctcaagaaaagaatagtagcgtgcaatttatctttgtcatgaccggcagagttactgatgtttgcaccttcaacattcctccaacatacaggctgccccggcaaagaaataacaccccccgcatgacgggcaaaagcagcccacgtagcatcatccgaacaccaagccataggaaaatgaacaaaaccacctgccgactgccatatctcccgactgaacacgtactctacggcagccgaatctatctttccctgtaacttatctaacagcagccggtaacaagacacacttccttcttccaaaggacgattggcacgtatccgcttgttttcaccatcaatgacagctaatggaaaacgaaagaaatatcctcgctgatggtgtgggcgcgacaaagcctccatgacacgttccacaccatcagccggcatcaaatcatcatccgagaaaagccagataaacggctctgcagacagctggatacacctctcccaatgggccaccaaatctttgccccccatattttcgctaaagcgatgatacaccagatttaccttattctgataagattccacaatcttatccaatctttcaggacttgcatcatcacctatatataacacgaactcatctttatgggcctgaactgcaattgagtcgagcgtttccttaaggaaacgccccttgtaggcgggaataacaattgccaatttctttatttgctccactttacaaagactgcatatcgttcaacttcttgtaatatccatttaaggctatcagttcatcgtgagttcctctttctacaatgtcaccttcataaagtacacaaatttcatcggcattcttaatggtactcaatctatgtgcgatagcgatagtagtacgcgatttcatcaaacgctccaacgcttcctgaaccaaacgctcggactctgtgtcaagagccgaagtagcctcatctaatataaggataggaggatttttcaaaattgcacgggctatactgacacgctgacgctgaccaccggacaaacgccctccacgatcaccaatcatcgtgtcatatcctttttccgtttccataatgaaatcatgtgcattcgctatcttggcagcttctattacttgctccatagtggcattctctacaccaaaagtaatattgttatagaaggtgtcattaaacagaatagcttcctgatttacattaccaatcagagaacgtaaactgtggatggatacatctttcacattcttgccgtcaatcagcaatgcaccctccgatacatcgtgataacgcggtaccaagtccactaaagtagactttccggaaccggactggcccaccagtgcaatcgtttttcctttaggaaccgtcagattgatatggttcaagactggacgcccttctacatagctgaaacttacatttttaaactctaacttatctgtgaaagcgtccaatggcaaaggctgctccggctctacgatatgattttccgctttcaatatcatatcaattcgctccatactggccaatccctgcggaatattataaaatgctcttgaaaattctttcaaaggattgatgatactataaaggataatcagataaaatatgaaagtagccgcatccatcggagcatagtttgtatttaagattaaagcaccgccaaacaacagcacggtcacaatcacacaagtgcctaaaaactcactcatggggtgggctgaactttgccggataatcatctcgttcattgcatcgcggaagtcattgtttgttttagagaaccgagcagacattttgctttcggctataaacgctttgataacccttaaacctcctaatgtttcatccaattgggacataatatctccccattgcgcctgtgctgtagaggactgtcttttcagcttccggctgacaacccccattatccaacctgtcagaggtaaaataaagataacaaaaagcgtcatttgccaacttaccgaaaacagagtgacaaaacaaaccaaaagagcgataggattacggataagcatatcgatggaactggtcaacgagttctccaccaccgtaacatccgcactcatacgggctatgatatctcctttacgttcttctgagaaaaaactcaaaggaagacttaacactttattataaacctgaatacggatatcccggacaatacctgtacgcaaaggtaccatgacagccgcagaagcaaaataaccggcagttttcaacatagtcataaagataagtattcctcccatcatggcaagtgtatagaacgcaccatttgtagccacaaaattgctcacaaagtaataggcattatttatgagtacatccttatccaaattatgaatatccataggaatgtactcataagacttggtatcaattttgaacagaatgttcaaaattggcacaatcgccatgaacgaaaacacattaagccattgcgacagaaagttcagtatcaatgcccatgtcaaatatttgcggtatggaagaatataccgcttcaacaaactaaagaactgtttcagcataattatcaattatatataatgccgcaaaggtaacaaaaaagaaataatcacccaagattaccccactttatcccctaatatttgttcatacacggcaagccttctttcctgcatctgtccggggttatatacttgtcgcaaactgtcttccgcatgggtaaccaactgtctctgcaactgcggattacttgacaaggctatgacagcttctgcaaatccggcagggtcatcaacaatcaagcaatcttcaccatccttaaaatcaatgccttccacaccctttgccgtcgttacaaaaggtacttttgacaatacagcatctaatattttcatacgcataccactaccgatacgtattggaacaacagcaacactgccttttaaaaaagagcccagatcttccacatagcctgccaacttcaattccgggtattcggacagcaaacgattgatacactctccacgccatttaccaattacttgcaatgtaaacgaaaaatggcgtttacgcagatgcggaatcacttcgtgacagaaccatgccacggcatccagattgggaaaatgatcctcacttcccacaaaagtcaggcgtccgctttggaccggaacaaaaggctgttccagcctgtcacccacttgcaccacagccggagaagtgtagatatggtctttccgtcctatgaagtcctccataattttacggtctacttcagtcagaacaataacatctttatatttcaataatgcactgcgctcaaaatcctttgctatatgaaaaaacatcctgtcaccggcagtctgttccctgaacaaagcaatctccttttcattacggatgtagcggagttcatgatgcacaaaaatagtctgtacattttcaggcaacaagaatcccaatgacaacagttcataaaactctacttgaataatatcaaaacctgaatgagccacctgagaaacatactccacatacccctggtctagcggctggaaacaagaactgaacaaagtactctttccccgtactaaatccacaacttcgcccgtttcatccgtccatatctgttgccggttcattttacgggttacagacgcatgtatcttttgcagccatttataataaaaaggatgtttaattctgggtaatctgacagtttgaggtttaggagtataaataaagaaatccacattatcccaaattttcttcaatgactctacatcttgcatacgcttctccgtttcaggataaagcaatacagatacggacatcttatgacgcaaatactccaccatattaaagaaagcttgattaccgcccgaatccagcggataaggaatgtacggaataataaaaagaattttctttctcatactaattgaatttaaacaatagtctaatgtctaatttaatttttagtttaatacagcaaatgctatgtagtgtataatgcaaaagtacaagaaagactgcataccaaaatgttaattatcgtttctttttaaaagttcaacacaattcctgtttcttgaaagaaaaaacaaagaagcaacttgtttatttaactatataacgttatatttgtaaaattaaaaaggaactaacttaacaatagagcatgaatgcacttcccttggtcagtgtagtggtacctaattataattataaacgatacctcaatctacgaattcagagtattctgcaacagacctatcagaatatcgaactgattttacttgatgatgcctcaacagacggtagcgaagaggtattatcggactatcaagaccatgccaaagtgagccatattctattaaacgaacacaacaccggaaatccatttaaacaatggtttaaaggcatgcaattagccaaaggaaaatatatatggatagccgaagccgatgacttgtgtgagcttacttttttagagaaagtagttcctttaatggagaaataccaacaagccgccgtatgctttgccggttccaagtatattgataaagacggtaatgtgctgagttgcgacatgaacaaatggaaatctgccatacctccatacgccgtgtttaatggggaaacttatgccgaacataacctttactggcgtggttacatagccaatgcaagctcggccattttcagaaaaagcatggtaaatgtccaaaatatggaacaatgcctgcaaatgcgctacagcggcgactggctgttctggttttatatggcaatgcaaggagacattatagaaagatatgaagtactgaactacttcagacaacatacccagaaagttaccgtcaaagctgaaaacaacggagggggtaagagcgaagatattgagatagtccgcattatggaacaacaccttacccacctgagcagatacaaacgatgtatacggagaggaatgctttacaaccgcattgccaaattaagcacaacagagcaagtaaaactgcaattatgggaactcctccggcagaaattaaacggaacgcggaaagacggacgtctggagcgcctcaaccggatagcacggctattctgtccttttgttctgactatgaaacgagaccgccttactccttcccgaaaatagaataagaaacggaaactgcttgcccatattttcgggcggactcacatgtttgcccctaaagtgaacaaattggcagccaattttacttttggcataccctcttttgatatttctaaaattctgtttacctttgttgttaatcatctgaattgattcaaacaaatgcaaactttactaaaacaaatgaaatatctccgttcactcatgcagcaatttgtaacagcatgtaagaatcaagctaagcttatccaacagtttactctttctttactttacttatttatcatacatatagttgctttactttttttcttcctgttccggcttgtcctgttcacctcaatagattatcagtttcctcccgatatacaaaacaactttctcatgcaagccactgcatttataaaagggctatggtttgacaatgttatagcttgctacatattgctgttaccattagtcattttatggataaccgctctctgcaactatcactccaagtgggtattcagatttatctctatctttttcattctattttattcactgtcgttcattatttcggcagccaacatcccttatttctcctatttttttaaaacaatcaattcttccatttacaattggttcggatatggagccactactgccggaatggtattgggtgagacatcattctatttccctatttttctaggactgatatctattcttctgctgtcaggaagtgtactacggttatcttcttatttctatcatctcatcaattcgaaatctacttccatcagcccgataaaccgcctatgtatattcgccaccggtgctgtttgtataggactttgtctattcggaatacggggacgcatgggatataaccccatcagagtaagtcaagcatactattgtaccgatccattcctgaatcagctaggggttaatcctgtctttaatctacttaccagcacactggatgataaccgtaaggaaaaccgctatcttcacctgatgccggaacaggaggcaataaccaatatgcaaagtatattgcaaagaaaaggaatagaaggcatctcccccattgcacgtgaagtgaaatgcgcagccgtccctacacaaaagaatgttgttcttattttcatggaatcgatgtcggccaacttgatggagcatttcggatctaccaaaaaactgactcctttcctagacagcctttatctggaatctctcagttttgaccatttttattcagcgggcatacataccaaccacggaatgtatgccaccctctactctttccctgccatcatgaaacggaatgccatgaaaggagcagtggtacctgtctattcagggttgcccaccgtattaaaggataatggctatcggaacctattcttcatgacgcacgaatcacaatacgataatatgaacgcttttctccgcactaacggatttgatgaaatatatgcacaagaaaactacccaaaagataaagtcgttaacagctttggtgtacaagacgatttcctataccaatatgccttgcccattctgaacaaaagagcagaagaaagacaacctttctttaccatattgctttctatcagcaaccatccctcgtatgtgatacctgactatttcaaaccacacagcacaaagcttgaagatcagattgtggaatacgcggactgggccatccggcaattcatgcaagaagcacgcaaacaaccctggtttgaaaatacaatctttgttttgctgggtgaccatgggaaattggtaggaagtccggactgtgaaataccacaatcctgcaaccatgttccactaatgatttacggaaaaggcatcaagcccgaaatcagacaagagccgggcggccagactgatgtggcaccgactttactcggactgctgaacatgagttatacccaaaacgacttcggcataaatttgttaacagaacaacgcccgtatgtctatttctccgccgataatttgatagcggctacaaatacaacccacctatatatttattctccacatgaccggcaggaattcaaatataagaagcaaggaaatgccttgcaacttgtaacaggggaggacagtacattctacgtgatgaaaaaatactgtttctccacattgcagagtgcggagtatctggtaaaagagcacaagactgtcaataaagctaatggacaataaggtgggacgggtttcaccgccttgccttccttaacggtcataccccaacctctcctcgttataatcagaggctatgtaggtaggacggcctttggtttccttgaaaatgcgccccacgtactctcctataattcccaaagagaaaagctggatgccacctaaaaagagcatgacaatgatcaaagtggggaagccggccgtttcatcaccataaagcacggtctttatcagaaaataaatggcataaataaaactggagattgaacagagcactccgcatactgtggcgatgcgcaaaggggcgatagagaaagaggttattccctcgacagccagattcaacagcttgagaaagttccaagaggaatggcccatcagcctgtctccgcgatcaaattcaatgcttttcttctgatagcctatccagcaaaacaatccttttgtataacgctcgcattcgcgcagacgacgcaacgtgagcacacaacgacggtccagaagcctgaaatcgcccacattgggcaaaatatcaatacggctcatccgctgaagtataccataaaaagccagagagaactgacgacgcaaccagctttcctcgccacgggtacgccgtttggcataaatgtcatcatatccttcttcccaatattccagcatctggtctaccagttccggaggatcctgcaaatcagcgtccatcacaacgcagcaatcgccggtggcgtaatcaaaacccgccagcatggctacctctttaccaaagttacgcgaaaggttgacataattcacccgcttgtcctgctgcctcaaccggcggaggcattccagcgtagtgtcgctgctgccatcattgacaaacaggatttcccattcataaacggcattgcggttgacaagctctatcaaacgttgatacagagtgggcagcatcgcttcctcattatataccggaatcaaaagagtcactttcttcatatcattcttcactatcataaagactcctcaaagatattacttttgtttgaaaacaaacctcactaataaaaaatttaccggaatggcaatgagaaacactgggatgggagccaacggacgggaaaaacccaaccgcagaaagagattcaacaatccgatatgtatcagataatttgtcagatgtgcccccccgaagccaaaagctttcttccaggaaggaggctgcccgaaagtaaaataagccgtaagataaaagttggcaacaaaactcagcacatatcccaaggtataggctacattgacctgaatgaatttttgcaagacaaaataaatgccatagtgcagccctgtagcaaaaaggcctaccattacaaatcgcaggaactcgggtatctgtttcagtttattcattttcattgatttaaaatgcaaagttaggtattactaaagaattattcgtacttttgcgacagtaaatataaaagaccgaaaaatatatgtcagacaagaaaaaagcattttggttcatagccttactaagcacacttgtaataatcccctttttgggagaaactattttttactctaaaggggaaccgcgcgaagcaattgtggcatactcgatgttggaaagcggcaactggatattgcctttgaactacggaacagacatcgcctataaacctcctttcctgtattggtctattgcagctatttccgccattttcggaggggtgagtgaattctcgtcccgtctgccgtccgctatcgcttttctagctatgcagttcgtgtttttcggattcgtagcccgctataagaatacaaagacagcagtcattacctcccttttactgctcacttcattcgaagtgcaccgggcggcggtggcttgcaggctggatatgctacaggtttccttcatcgtcatctcactttgcttactatttcgctgggacgaaaaaggctgcaagggaataccttggacggctgtcgtgctgatggcatgcggcacgctgaccaaaggacctgtgggttctatattcccctgtatgtgtatcggtatttaccagctgatacggggacgctcattcggcaagactttcctttccttattcggaatcgggctgctttcccttattccattgggaatctggttttatgcggcctggctacagggaggacagccgtttatggacctgatgctggaggaaaacaccggacgctttgtcggcaaaatgtcatacccgtcgcatcacaatcctttatggtataacttcctgaccattatatgggggtggataccttggacattggtcttgcttatttcactcttcggactgaaatggaatgaaatgcacctgctgcccgcaggaaactctttcaccggacgcatcaggaaggtttgggataacatccgctcacaatcccccatacagctgtttatctggatagtgattatcgctatttttgtcttctattgtattcctaaaagcaaacgcagcgtctatttgttgcctatctatccatttatggctgtactgattgcccagtatctggaggcgttaatgcaaaaaggggcgaaagtgttcaaaatatcggcttatatctttgcctcgctctgtttgttactcaccgtggtgttttttgctgtacgctgtcagatgataccggacagcatatggggcaacggacgtcatgccgccgaaaacatagcgtttatgcaagctttggaaagcacgtccttttctatttccaaatggctgattatagtattgccggtagtggctgccatctgtacattaaggctggttatcaaaaaaagtagtacggggtcactcctctatggaatcatcggttgtgttctttgcctgtttgtcgctttagacggggtatatcagccaacaatactagctgtaaaatccgataaacatctggcagaagatatcagaaaacaggtgcctgaaggagtcgtttattcatatacagacagaatgatacggttttattgtacaaattattatatgaataaccaaatgcggaatttcacactggaaaatccgcaagaagggtatgtcatactttctgcaaatgcacaagaggagtttttaaagaattacaatgcaaaatatcagctggaagaggtcttccatacagattacagaagttgcgacttacgcaatacggtaatcatgtacaagttcaacgagaaacggaaatagttatatccggcagattctgcaccgattgggacgcggactatatgaattccatactgattcatatagtccgcgtccaagttttactatctgttccctaaatcatcataaacagtttgcaatatcgccttacccttatccagacgggactcgtcagcttcaggctcattaaaaagaatactgccggaattattatcaaataccgtcactcctgtactgtcccggaatgagaacccattattgaaactataaaagacaaaaggatacttataatcacttcccaatacattacggctaaacgtaaatgcagtatgttccagcccaagctgccccaacaaagtggctgccaaatcggtctgattcataatcttgtccacctgcataggctgttttaccgctccacctaaccataacaagggaatatgataaaaacgaggcatcgcattagacccctcacgcgggtaatagaaaccatgatcgggaaggcagataactaaaagatctttccatgcgggagtctgcttcaaccggtcaataaacttacccagacattcatctgtataagcaaaggcattgggaattttatcttccagccggtgataaggaacttcgaaaggttcatgactgctaagtgtcagaaacgcagtatgccaaggcccttcttccttccggtttcttaactgattatataaatattcaaaagtaatatcatcattcactccccaggcattactggtctgttcggccaatgagaaatctgtattagctataagacgctgataaccggtactcagcagataactcttcatattggtaaagttgatatcacctccatacaggaaatctgttttataacccgccttggacaatccttcagctatagcaggcagcgtacggctcttggcaggaattttcattaccgatgccgtaggcaatccaaggtaaccgctgaaagtacagactgttccacggtcggtacggaaactattggcataacagtttgtaaaaaagatcccttcctttgacagacggttaaagtggggtgtcacatcaggaagaccgcctaaaggttctacaaaagcacctccaaaaccttccatcaaaataataagaatattgggacgcttggtattcaggacttgaataatactatccccatctgttgtaggataaagtccgtcaaacaatgcagcccgcttctcttcatcaaagaaattgaactctgatgcaaaatcctgggatttacccatagaagacaacaaactgaaatcgggattgaccgccgaatgattcaagaaaggttcgttgctgaaatatacttgccctatattagaagtggattccgttacaccaccacgtataatgacgaaaagcacacctcctaataacagcattcccgcagttcccgttatccgtttccgggtggcagtcaaaacggaaggcgtgattttcagcaagacccaactattcagagctatgagtaacaagatggcaagaaccctcagcaagataaatccaacggaaacactcgccaaagcttccttcggtgaatcgatataaagaaaaacagatacgtccagtttaaatccccaaaatgtatataatgccatatctaccacaaaaatgatagaaataagcgcggcggccaaaatataatacccgtaaagtatttttttcaaagggaatttcctaaaccaaatacttatcagtaccaacaagaatggaaatgcagtaagatatcccgccgtagcggcatcaagactggctccatgaatcattacctgcatataatcggcaaacccgaatcctttttcaatggaaccattatagagcatgaataatggtttctgtagaataaatatcagtaagaccgtaaaaaagtacaagctgatataagcaatcctctttttcatatcttcagttctttattatttccgtccgaaatcagccgggacctctccccatcggtcggtttcccacttcaataaaggtgtggtatatttattttctttcagccaaatttcggcccgttctatcatttgaaaaagtttctccgtctgaggagtccgttccagtttagttttacatttcttctgcttcacccaactcaacgcattacggctgtccgagtaaacaggcatattgatatttttctgcttcatcaacgccaaagcatggacaatggcaagaaactctccaatattattcgttccataaacaggaccgaaatgaaaaacctcctgtccggtaagcaaataaacgccccgatattccatcggtccgggatttccactgcaagcagcatccacagccaggcagttcatatcaaagttctcgggaagttgtttaggaacatcttcttttttaacagcattcttacctatataatggaaagcggaagaagccaaggcgtgttccgcctcctctttggtctcgaatgacttgtattgtgcgccatcgtaaccttttatctgtagctggcagtcagtccaagagtcataaactcccggattgacgcctttccatactacataatatttctgtttctttaccatttacatacgttcaggcacttcaatacccagtaggcccattgctgtctttacaatcttacccacattagcactcaatgccagacggaagactttcaacgcttcattttcttcacgcagaatactgaaatcatgatagaactggttgtattctttcaccaaatcgtatgcatagtttgctataatggaaggattatagtctgagcctgcctgcttgacaaccgatttaaaatcagccagcatctgaatcaaaccttcttcttttgcgctcagttccaaacctgctggaatgatttcgggaataacgatacctgcttcagccgctttgcgtaatacagactggacacgggcatacgtatactgaatgaaaggtcctgtattgccattgaaatctatcgattctttcgggttgaaagtcatatttttacgtgcgtccaccttcaggataaaatatttcaaagcgcccaaaccaacaatacgggcaatattgtcggcttcttcttgagtcagaccgtccaatttacctaattcagcagaagtttccttagcagtttcaatcattgcttccatcaaatcatccgcatccactactgtaccttcacgacttttcattttgccctcgggcagctctaccataccgtatgagaaatgaaccaatcctttgccccattcaaaacccaatttgtccaacaagatagaaagtacctggaaatgatagttttgttcattacccactacataaatcatcttgttgatggggtaatcctgaaaacgtaatttggcagtaccaatatcctgggtcatataaacagaagtaccgtcaccgcgaagaagcaacttatggtccagtccttcggcagtcaaatcagcccatacagagttatcctctttccggtagaagaaacctttttccaatccttccatcactttctccttaccttccagataggtattcgattcataataaattttatcgaaagtaactcccatcatcttatacgtttcatcgaatccggcatatacccagtcattcatcttcctccacaaggcacggatctcagggtcattcgcctcccacttacggagcatctcgcgagcttccagcatcagaggagagtttgcctctgccttagctttagcttcttcttcattcaagccttcagcctggtactgagctgtcagttcctttacctcagccttgtaatgcttgtcaaaagctacataatagtcaccaatcaaatggtcccccttcttgcccgatgattcaggtgtttcaccgttaccatatttcaaccaggccagcatggacttacagatatggataccacggtcattcacaatattggtcttgaccaccttattgccatttgccgccatgacatttgccaaggcatttcccaacaggttgttacggacgtgacccagatgaagcggcttgtttgtattgggagaagaatactcaatcatcaccaacggagagttttccgtagccttttcaataccgtattcgggagcagcctgaatagaattcaaaagttcaatccaacaatccgaagcaattgtcaaattaagaaagcccttcactgcattgtaggctgaaaccaattcgggagcatgctctttcaggtatccgcctatttcctgtgcggtctgttcaggagctttcttggacattttcagaaaagggaaaacaaccaaagtaagatgtccttcaaactctttcttagtcttttgcagttgtaccatttttccgggtacatcctgtccgtacaacgttttgatagcgctgataatggacgtggtgagtttttcttctatattcataatatgtacgtacacttatttgttattgagttgcaaagatagacattttaggcgaaatctttcctatcttactttaatttactatctttcctctccgcaaactatatccttttaactaaaaaaataagtatcaaaaagtcaaaagtcactattttatcgaataagaataagaggacaactttcactaatcaagagaattccactttataaaaagctaaattatctgcataaacatacaatgactaattaaatatgtccaacaacacattcccagttcattagaaatataaaaatacattgactacaagaattaattcaacacgaaattacataaacacttgattgataaaacaatattatatattaaatccacattaaaacaagacaaacactattttgataaagttaagaaaaaccgtatatttttatcctaaagaaaggacttcgtaaaaaatatattaaaatatattatcctatttaaatcaaaatacatatatttgcggtcattattaaataatgcaattataagaatgcaagcaaaaagaaatcctaatgcagttgaatagtaataaaaccactatggaaaacgacacaatgatacaagaaattgcatttacaatttaaaaaagagagttcaatacataatgcctgaaatatggcaatttataaacccctaattaaagccaagtttatatgagcagattttcttcattattatgtagcttgctattctgcatgattacatatgcacaggaaattacagtaactggtaaagtcaccgcaggaggcgaagaaatgcctggtgtcacagtagctgtaaaaggacaaactcgcggtaccatcacttctaccgatggcagctaccagattcaggttaacggcaatgaaagcctgatcttctcttttgtaggttacgaaacagtaactataccggtaaacaaacgcaaagttattaacgtagaattgaaggaaacaacccaaatggtagatgaagtagttataaccgttccttacggtactgccaaaaaatccacatttacagggtctgcaagctatattgccgccggcactattgaaaaagcacaggtcagtagtgtgtcaaaagcattgcaaggaactgtagctggtttacagtctttttcctccagcggtcaacccggatcagacgcaactatcctgattcgtggagttggttctgtaaacgcttcaaccaatcccctctatgtggtcgatggtgttccttacgatggtgctctttcctccatagcatcttcagatattgcgtcaatcactgtattaaaagatgcagcttccgctgcattgtatggctcacgtgcagcaaacggcgtaattatgatcaccaccaaacaaggaaataaagatagcgcacccaccgttgaattatctgctaaatatggtttttcaagccgtgcacgcgcagactacgaccagttgaatacaaaccaatattatgaattatattgggaagccatgcgtaactatcgtatggacaacggttactctgccgaagaagctgcagcatgggcatcaagcaatgttacaggcaatctaggcatcaacccttatggcagtgcttaccctgagccaatcggccatgacggaaaactggtagcaggcgccaaaccattatggaacgacagctgggacgacgccctttcacaagatgcacactatacagatttaaatgtacgcgtaagtggtggtagcaaaacctccaaatattttgtttcagcaggttacatggatgatcaaggtgcttatatctgctctggtttcaaacgctatactctccgcgccaacgtgacttcagatatccgcaaatggttacagatcggattgaatgtatcaggaactcattctgttcaagactatcccaagcaagatgactcaacaatctccaatgtggtcatgtttgcccgttcattgccatcattctatccagtgtatcaacgtgacttggcaactggagcatatttattggacgaaaatggtaaccgtatgttcgattatggtgagtatcgtcctaactcgtatgcaaaatataatctgctggcttccatgccacacgataaaagcgagataaaacgcgatgctgcttctttacgtggctttatccaaataactcctatcgaaggactttcttacaaaatgtctttgaatattgactataataacaaaacaaatcatgactacaccaatcctacttacggtacaggttctatcagtggtggcagcgtaagcaaatacaactaccgcactacaggcatgacttttaataatgtcattaattatcaacacacgttcaatgatgtacatgatatccgtgtgatggccggtcaggagtactatgaatataacacttccaatttcggcggaagccgcagcaaagtcatcatggatggattctatgagcccgacgcagcttcctctttaggtgattttggcggaaacagcgaccaatacaagctgttaagtttctttggaagtgctgaatactcgtacgatcaaaaatacttcttatcggcttctgtccgttctgacggttcttcccgtttccatccggatcatcgttggggtactttctggtcaataggcgcatcttggaaaattatgcaggaagagtttatgaaggacacatcagactggctatctaatttatcattgcgtgccagctacggagcgcaaggtaatgaccaggtaggttattatgcgtatcaggcgctctattccatacgtaataacctcggtgaatccggtttgcatgcttatcgtctggcaactcctaatttatcatgggaaaccaatctaaatactaatatcggcttggattttggtttctggaacaatcgcctaagtggtacaatcgaatactttgaacgtcgttccaaagatttattattctctaaagacttagttccatcttcaggtttctcaagtatggacgaaaatattggtgccatcaaaaattatggatgggaattccaaatctcaggatatcctatcatgactaaagattggaaatggaaactttcttttaatgctactacctataaaaacaaaataacctcattacctgccgaagaaatgtggagtggcaacaagaaatgggtaaaaggaggatcgttatatgacttctatttagtagaatgggctggtgtcaatcctgaaaatggtaatcccatgtggtatcgttacaataccaacggagaaaaagtaaccacagaagactattcatcaaccacaccggacgacaaagtaaaatgtggcaattcactaccagactggactggcggtcttcaatcagatctttcattcaaagattttacattatcattcttattctcttattccattggtggtaaaatctacaatggggataaagtttcattgatgagccaaggacctacaggtaccagttggagcgtagatatgttagaccgttggactcctgaaaatccctataccgatgtaccacgtctgactacttctcccaaaagctcatggacaaactcttcaaatcggttcttagttgaccgttcatacttacgtctgaagaatattacattctcttacaatctgccgaagtcattgctgaacacattgacactgaaagatgcaagcatattttttcaagcagaaaatatgctgacattagccaaacaacaaggtctagacccagagcaaactttcggaggctctacttactatcgttatccggcaatgaaaactatttcattcggtatcaatgtgaaactttaatacagaaagaagaatatgaaaactatttttaaatatatattttcagtcgcactgggaagtataatgctcacttcctgcgatttggatacaattcctacaacttatgtagatgccggttctgttttcggtaaaacaggagatgccgaaaaagtacttaatggtggttggaactacctgatggaaactttcaattcttacgccaaccctggctatggagcaatgttacgtgcaaatgatgcaatgggttctgacgtagtactaaacaccaaatatggttttagagcacacaatgaatttaccgctatttatggaaaagggggcacaaataccctaagctggcttttagcataccgtgttattaatgactgcaatggtgtattagataatattgatgctgccgaaggcacacaaattgacagaaatcgaatcaagggacaagcgttagccttacgtggttttctatatttacatctagcttcttgttattcttttgccattgataaagatccagatgctgtatgtgcacctatctatacacaatcaacagatgaaacaattgcagctgaaggaaaacctgcatcaagtgtcagtgaagtatatgcgcaatctatcaatgatttagaagaagcattagaacttattcccgaaacttatgtacgtaacgccaaacacaaaattgataatgaagttgtcctaggtattctctcacgtgcctgtctttatgctcgtcaatgggaaaaagctaaaacttactcagacaaattgttagctaaaaacaattatctaatgactgaaagtgaatataaagctggattcaattctgtagacaataaagaatggatttgggggcatgctcaaaccaacgatcaaagtaatgccagttatcagtttcattatttagatactacaactaaaggatcatactattatagcttcaatgtagacccttacttccgtgatttgttcgaagatggtgattatcgtaaagatatgctgttctgggctacagatccaggagctgacgttgaatcagcagcctatgtatggatgcgtaactctaaattcagattccgcgatatcgaaaaccaacttggtgatatcgtattgatgcgcgttgctgaaatttatttgataaatgcagaggcaaaagcacatctgaatgacccagatgcaattaacaaattaaatgatttaaaaacagccagaggagcaaaaactattaatacaaatctttcacaacaggatctattggaaacaatttggttagaacgccgcaaagaattatggggtgaaggattcagtttgatagacattatccgtaaccaacaggctgtagtccgcaaagcatatcccgaaggtcccattgactatatttacactgatgaaaacggacaaactcacacacttaagaaaaaaactcaaggacatcgcttcttcaattttcccgataaaagtgcgttctgtccaaatagtaaatattatttatacagaattacagatgcagaagaactagcgaataagaacctttacaaagatcatcctaagctctcaatttatacagaataacagcaaactctaacaaagtgaaaaaccgtagcaaatgaattgttacggtttttttattttttcccggacagattaaggaaagacatacctaaacaatcctatagaagaaattcctaatcacgttttttaatatgaccgggagtttcctgttttatttctttttcaaatcctcaggagaaaccaatttataaagcttgtcactaggacgtaccttatcggggactttaaaggatacatgttgaccttttcttaccacatccaccggtttcaaatccacacgcgcctcatccaacgtcagaaataccgctcctgtagtaggtcctgtaatcagaagtttatcccctactttcatctcagcagcttccaccagaaactctgcaacaccaatattagaaaagtacttgattcccttacccacatacactttacgctcagtagcctccgaaccatagttcttactccattcacccaaacgctgtcctaaataatacccattccaaaatccccgattgaatacagtcttcagccgctcatcccaagcctgcttcttctcctcggtaaaagtaccctccagataagaacaaatagcttctttgtaacattccaccacagtgcgtacatactcaggtccacgggcacgcccttcgatcttgaagacacgcacaccagcctctatcatttcatccataaaatgaatagttttcaaatctttaggagacatgatgtatttattgtccacctccagctcaatatcactctctttatccttcacatcgtatgcacggcgacatatctgcatacaagccccccggttagcagaagcattcatctcatgcaaactgagataacacttgcccgacactgccatacagagcgccccgtgacagaacatctcaatgcggaccaattctccattcggacctttaatttgttccttctggatagtatcataaatcactcgcacctgctttaaattcaattcacgtgccaataccactacatcagcaaagcgagcataaaatttcaatgctccggcattactgatatttaattgggtggaaaggtgtacttcctgccccacctcgcaacaataagccattaccgccacatccgcagcaatcacggcactgatgcctgcctccttagccgcatcgacaatggtacgcatcaaagcaatatcttcatcataaataatggtattgattgtaaggtagctcttgataccatgtttatcacagatctgtgctatctcacgtaaatcattgacagtaaatgtactggcagaacgtgcacgcatattcagactctcaattccgaagtaaatagaatccgcacctgcctgtatagctgccgccagcgactcacgtgaacctacaggagccattatttcaaagtcttttatagaagctttcattattcttttgattaatatgtgtgcaaaggtaggcttttttccgtatttttgcagcctgatttcaccacagattacacagattcacacagattataaattaatactcaaatgaatctgatttttctgtaacccaaagataaacatacaacaatgaagattagaaatatagacctggacaaatacccaattttcttagccccgatggaagatgtaacggaccccgcttttcgcctgatgtgcaagaagttcggtgctgatatggtatataccgaatttgtatcagcagatgcactgatacgctcggtaggtaaaactatgcagaagctgaatatcaacgatgaggaacgccctgtagccgtccagatttatggcagagacacggaaacaatggtagaagcggcgaaaatagtggaagaggcgcatccggacatcctggatattaattttggctgtcctgtaaaacgcgttgccggtaaaggagccggtgcaggtatgctgcaaaatatcccgctgatgttggagattacccgtgctgttgtggatgctgtaaaaattcccgttactgtaaaaacacgtctaggttgggacaatgagcataaaattatagtagatttggcagaacaattacaagattgcggcattgaagcactgaccattcatggacgtacccgtgcacaaatgtacactggtgaagcggattggagtttaataggtgaagtaaaaaagaatccccgtatgcatatacctatcattggaaacggagatataactacgccacaacgtgccaaagagtgttttgacctgtatggagtggacgctattatgattggccgagccagttttggacgcccgtggatattcaaggaaataaaacattatatagaaaccggtaaggaactccctgccctttcttttgagtggcggctgaatgtactccgccaggaagtgttggacagtgtgaatctgcttgacgagcgccgtgggattcttcatgtacgccgccatctggctgcttctcctttatttaaaggcattcccaactttaaagagacacgtatcgccatgctccgtgccgaaacagtgaaagagcttttcagtattttggattatatcaggggaaattacggaatgaattgttaatgctacaatatattaatgtgccaattggctgtgctgtattccgcatggcaattggcacattaacatattggcatattgtagcattaacacattatttattctattttacgcaaacctcttttaggagagaaatcaatgtttttaggattgcccttataagccacctcaccactactggatgctttcgcagtcagcgaaccggtcacataacattccacatcaccagaggaactggcactagcagttacatttaccgccttcataccttttgcctttacatccccactactactggctctataagaagcgttctcacaaatacctgccaaaattacatctccggaagagctggcatcagcagatacattagcagcgttcagattcttgacagatacatcaccagaactactggcatcagcagagaaatttgtacaagataccttttccagaatcacatcacccgaactattagcggtagccgcaaaatcatcacaagaaataatgcttcctgttacatcaccgctactgctagccttaacagtaactttcccactcgttttcagtccattctttataataatgtcaccagagctggaagctttcaagctgttcacagccggagcagaaactcttacttcctttttatgttttccgtttattgaaaaattgtttcttggcgatttaaaaccaaccttaagtactccaccctctacacggacatcaatatagtccaccaaattgtccggagcatatatttccacatcctgtccaccggaactttgagtatagattacatccaccgaagaactggtagagatagcattaaaactacccacattcacttttttggtaacatagttcttgctaggagttattctctctgcacatgctgttaccgacactaacataagagttaccgtcattaaagttgatactaattttctcatattacttttgttttatttattagacgttatttctatgccaaacgttgcaacgtttgaccattatttttaaagcaagattcatgccagcaacatttatcactgataatcaacaaggtataaacaaagcagggtgtccgaaaatggacaccctgtacgcttttatatgctttttaaaactatttcagtacaagttggaagactacagaagcaaaccaacgcttatacatataagtagccgtaatataaatacataccgccgaaatccatccggcaataacatcaatcaaataatgcgcctgaatatagaccgtagcacaacatagaagtacatagaacggtgccaagaaataacatagtttcttattaacacgataggccataatcatcacaatggtagatataccgacatgtgaactaggaaaagcagcagtaggccgttcccccacttcctgtgaggcttccaccaaattaaagaagaaaccatgatcaaaaccgggaccaggcagcagaatatcattattattaaaataatcaccgatagcagggaaatgctgcgccatcacattatccattccgatagcagggaaataaaattgcggaccggcaaccggaaccaatatataaataagataatagataaaaaacgaagtgaccaacacaaaagaaaccttttcaaaccactcaaaacgaaacaagaaataataaatagtcacaatcccaatcattggataataagcaaaataccccatattaaatggttcactgaaccacatggaaggaaaatgttcactaaattctaccgaaggctggcaacggaacaaaaactgctccgccgaagcgaagaaattatccagattgggaaaaagacgattaaattcaaaggtatcgggataccaatacgctaaaaatgccatctgcacagccattcgtataaatgccgtaagtttacacggatacttacgatacaaatatattaatgcaaacgtaatggccacaatgcctgcacgctccgaaagcataattacagggtgatccatacgaggaaataatattaaaaccattatggtcgtgagggcattatatatcagactaatgctctcgacggcaaacaatcctttcacactgtctacccgtttgaataaatttaaagccatccttctttcttataccatgcaatgatttcctttactcccttgtctaaagggtactcaggacgatatcccagttcttccaccaagggtgaaatatcgcattgccaattacgttgtttcattattttatatttgtcagcattcagcgtacttacctttcccaggcaacgcgctgaaaattcagcgagcaaagatacaacttttaaaataaataatgggcatttaatgtgtataacccacggattaccaagttctttttgtatcaaatcagaaaaagtacggctgaaatagacatttccgtcactaacaaaataggcgcgctgccgcactccatgttctattgccaaaaaaacagcttgtaccaaatctctcacataaataaaggtaagatcctgccttttaaaaccaggagcaaagtctatatgctgcttgatagacttcaccatcagaaaataatcgcgttcgcgaggtccataaactccagtaggacggaaaatcactgtcggaaaatcattcaatgattgcaggtaatgttccgactttagcttactgaccccatatgccgtattgggcattgccgtatcacgttcactaataggtgcataattatcttcatgaataggaccgaaaatactaagtgaactgatataaacaaattgccggggaaccatatccaaggtcctcaaagcttctacaaaattacgggtataaacataattacctttgtcgaattcgtctttatgacggcatttagtaacaccggcacaatgaatgatataatcccatccctgatgcaattgtttatgaacagccaattgctccgtcaaccttccgggatgagcaaaatccaattcggcaaattgaatgcgaggatctttcaaataggcacgactactgcttttacgtacaccagcccatacctgcatatctctctccaatcctccttccaccaggaaactgccaataaatccgcttgctccggttaccaatactttctttaatcggcaagtattcttctgtgcaaattcttcgttattcattcttcgtattttatttcaccggttccacatgaatacccacatgagtatcctctccaaatttttcttttaatctatgttcaatacctgttgctgtttcgtgcgctttatgcagagaaatgttcccatccatgcgtatatgaatctctatagcataattgttcccaatgcgtcgcgtgcgtaaatgatgcggctcgctcactccatcaaaagataacacaatcccctctatctcacgttccacgctatccggcaaagacttttccagcaattcatccaagcaaggaatcagcaacttaatggaaacccgcataataaagaaactgactgtcacagcggcaataggatcaagtaccgcccaatgaggaccaagtaaaatcgctccgccaataccgacagtcgtaccaatggatgataatgcatcactcctatgatgccatgcattcgccacaacagcctgtgaatcgcatcttttccccactctgactgtatattgataaagtatttccttcaacaaaatagaaataatggcagcaaccaatgccaacattcccggttgacgaagctccccacctcgtagaaaaaccaatatttctgttgctccattccataatattccaaatcctatccccaataatgccataccaatgaaagcagtagccaatgtttcatatttcccatgaccataatcatggctcttgtccactggtttattggatatacgtacaaaaagaatcactactacgtccgtaatgaagtcagatagagaatgaactgcatctgccaacatagcggtactatgccctgcgattccggcaagaaatttaaaaataaccagcaagaaattaacaaaactccccactagtgtaactttataaatttctttttccctgattttcttatcaagttcagtcataacagtttttttagaacggacaaagatagcacgtttcatttagattcaaccaaatttaatgtatctattgaaccactattccatttattttgtttactttgtagcacataatacattaatatatccccttatggctaaaaagaaagaaaaaaaagcagggaaacgtatgaaaaaaagcgaaatgtctgaacgactgataagcttattccacaccaaaccaaacgaaacattcagtctgaaacaattatcaagcagtctgaacctcactacacatccgcttaaaatgctttgtgccgacatcattactgaaatgattgaggatgattttctgcaagaagtagaaaaaggacactacaaactaaacgaccacggcctgattatgactggcgtctttcagcgtaaaagcaacggcaagaactccttcatccccgatgatggtggagaaactattttcatagccgaacgtaattcggcacatgccatgaataatgacaaagtaaaaatagccctctttgccaaacgtaagaatcggaatccggaaggtgaagtgatagaaattctggaacgtgccaatgatacttttgtcggtacactgaaagtagagaaattctacgccttcctgctgaccgagaaccgcaccctggcaaatgatatttttatcccgaaagataagctgaaaggtggaaagaatggggacaaagcggttgtgaaaattgtagaatggcccgaagaggcaaaaaatccgataggacaagtcattgatatcttgggaaaagcaggagaaaacacaactgagatgcatgccattttggccgaattcggtttaccttacgtatatcctaagaatgtagaaaccgctgccgaaaagattccggcagagatttccgaagcggactatgcagaacgtgaagatttccgcaatgtaacaactttcaccattgaccccaaagatgcaaaggactttgatgacgcgctctccatccgtctcatcaaaccgggactatgggaagtaggcgtgcacattgccgatgttactcattacgtaaaagaaggaagcgttatcgacaaagaagctgaaaagcgcgctacttccgtttatctggtagaccgtaccatccccatgttgcccgaacggctgtgtaacttcatctgttccctccgccccgacgaagagaaactggcattctccgtcattttcaatatgaatgaaaagggagaggtgaaagactcgcgcatcgtgcacaccattataaagagcgaccgccgtttcacctatgaggaggcgcaaaaagtgattgaaacgggtgaaggcgactacaaagaagaaattctggagctgaacaaactggcacaaatcctgcgtaaacaaagattggctgccggtgctattgactttgaccgcatagaagtgaaatttgagatagacgaaaccggcaaaccactcagtgtctacttcaaagaatccaaagaagccaataagttgatagaagaatttatgttgttggccaaccgcacggttgccgaaagaatcggtaaagtacctaaaaacaagaaagccaaagtattcccttatcgtatccacgaccttccggaccccgataaactggagaacttgaattggtttatcaatcgcttcggatataagatacgtacatcgggtagcaaaacagagatatccaaatccatcaatcgtttactggacgacataaagaataagaaagaacaaaatctggtggaaaccgtatccttgcgtgccatgcaaaaggcccgttattccactcataatattggccactatggtctggcatttgactattatactcactttacctcacctatccgccgttttccggatatgatggttcatcgtctgctcacccgctatctggcaggaggacgtacggtacaggaaacgaaatacgaagagttgtgcgaccatagttctgaaatggaacaaatcgccgccaatgcagaacgtgcttctgtaaaatacaaacaagtagagtttatgggtgaacgtttgggcatggagttcgatggagtcatttccggagttaccgaatggggactttatgtggaattgaacgaaaacaagtgcgaaggtatggttcccatgcgtgaccttggtgatgattattatgatttcgatgaaaagaactattgtctgacggggcgccggcatcacaaaaaattcagtttgggagatccggttaccattaaagtggcccgcgccaatctggagaaaaagcaacttgatttcgctttgatcgagaaataaagattaacatcctgttgtaggggcagactggatctttccctacaacaagacaatagtttcatttacctcactcttctattcaactgattattcgctttatccggcttggatttaccgatccgtttgccaccggacttctttttagtttcctgtttcaccttaaaagcaaatggatttttcttatttaccataaatattccctttttctgcaaaaataaaggattaaagtcaatattcattctatttattggcaataatatagaatttacttacttttgtccttccaaaacattcaattcatgactacattcaattacacgaacatattaacgcaggcagtagatgaattatctgaaagccagtcctataaaggattattccatcaacacaaagatggagatcctttaccatctgccaaatccctatacaagatagtagaattggcacgcgccattatcttccctggttactttggtaattccaccgttaacagccataccatcaactaccatatcggtgtaaatgtagaaaccctgttcggcctgctgactgaacaaattctggcaggactttgcttcggacaagaaaacagtaaaaatgcaaccgatgacaatgaaccgtgcagagaaacagcctctttgctggcagctcgtttcatcaataaattgcccgaactccgccgcattctggctaccgatgtagaagccgcatattatggtgatcccgccgccacatgctttggtgaaatcatcagttgctatccagctatccgagctatcagcaattaccgcatcgcacatgagctgttaatactgggtgtacctttaatcccacgcttcattacagaaatggcacattcggaaaccggtatcgatattcatccgggggcacaaataggacatcatttcactattgaccacggtacaggtgtagtaatcggagcaaccagcatcatcggaaataatgtgaagctctatcaaggggtaacattaggagctaaaagctttccgctagacaataatggaaatcccattaaaggcattccacgtcatcctattttggaagacgatgtcattgtatattccaatgcaacaatcttagggcgtgttactattggcaagggggctaccgtaggaggtaatatttgggtaacagaaaatgtacctgccggatcacgtatcgtacaacgaaaaaacaaagacgaataaagaccttttgtcatcatagattagtttggattacattcataatttatcaagttttaaatatgtgtaaatccatgtaatctatgatcagaaacttctttatgcacccacggaagtctcagcacaaagcagcatctctgtgtataatcggcatcaatcacaagagaacctccaaatttctcagccagcaaccggcagataggaagccctaatcctgtccctcgcataaaatcatctaattgggtaaaacgttcaaatacaaaatcatgcttgtctttaagaattcctttccctgtatcaataataagtaataagtctgccgccccatgcaaaatagtaatattttaaattatccagcctcaaacatactttcttcacctcatccgtctgtttcaatatattctcttcatcattcttataataaaaataatccagcttaatacaataagaaataatttgcatatgcttatcgcccgattcctcacttctttgcagaagagtatcacacatacttaaaacaagaggggaatccataatttgaagaaaaacataaattgacaaataaaaacagaaaaaggagcaccgacactctgatactcctttctcctaaactaaagcaaaccaacggttactttgaagcatatgcgcacaacatccacaccattttttcctgttccttcaaatagtcactcatcaccgctacagtagcctcatcaccggcttgtgaagcgacagccaaaagtttacgctcttccacgatgaaatgactgtaagtttccaaaatgttgttcaatgcttcgtcaccgtttgtaacaccctctacctcttttatattcgatactttcaaataatcgctatacttgttcttcgggacgcctcccagcatcaggatacgttctgccagttcatccactttctcggctgcattgttatacaaatcctcaaatttgctgtgcagtacaaagaaaccatgccctttaatattccagtggaacccacgaagattagcataaaatacttggtagtctgccaataattgttgcaatgattctactacctttgcagctgccgctgaatctaacttgatataatctaatgttctcataatgtttttatttttaaattgattacttttatttttttctctgatgcaaagataagggggaaagtaatgcgtgtcaaactgataatttctatctttgtatagataaaatctattaagctgaaaattatgaacctgcaacaactggaatatatccttgccgtggatgagttaaggcactttgccaaagctgccgaatactgtaatgtaacacaacccaccttgagtgccatgatacaaaagctggaagatgagttaaacaccaaattattcgaccgtaccacccaacccgtccaacctacactgacaggacggaaagtgatagaacaagccagaataaccttgcgccaggccaatctgattaaagatatagtaaaggaagaagcatgttcgttaggaggtatattccgtataggagtcctgcctacaatcgcaccctacctgctaccccgtttctttcccgaactaatggaagaatacccctccttggacatcagagttacagagatgaaaacacaagaatgcctggaggcactgaaagcgggtgaactggaagctgtccttattgccggagcagcagaaggggcccatttccactccatacctctttattatgaatcttttttaggatatgtttcaagacataacgctctctttaaaaaagaaatgatccgttccagcgaagtcagcggtgaacagttgtggctgttggacgaaggacattgtttccgcgaccaactgatgcgtttctgccaattggaatccgcccagtcttgtcaaattgcataccggctgggaagcatggaaactttcatgcgcatggtagagagcggaaaaggtatcacatttatccccgaactagccgtattgcaactcaatgacgaacaaaaacgactggtgcgtccgtttgccatgccacgtcccacacggagaatctacatagtgacacgtacagacttcattcgtcataccctgctcaatatgctgatagaaaaaatcaaagcctgcatacctaaagagatgctgacattgcaaaatggtcaaaaagtagtatgacagcaaactttttaataaaacagtaacgtcctatacaccttcctgtaacaggtaaatacgatatttgcagtacaataaaaaaggaggtatatatgaaacttaaaagcaatgaatatcagatagaatgtacacccgacggggaatattacgcctttttaacagactaccaccaatgctgcacttacggtgaaactgccgaagaagcattggaaaccttgtcagatatcgccgatgagtttttcagcgaagtaaacgaagtctatctggcagaagaactcgcataaaagtcactcaacctattaatcatagaattctcttacagaaaccatacctgtgcgatacagatatggtttcatttttatcttaagcatgccccatacggtatagactgtatcccagataaaccaaatacaaacaagagaccagtatcattaaagcacaaaccacatatcctttacgtttctcattcgtcaattccattttcattctgatttctatttaagtttcttgattcagcaaaaatggcaaattcctgtgtagaatttatttctataggataacaattatattgccggatacattttttcaatttattccaaagatacaccaaatcccgttttcaaagactttttataattgaagataaataaagaaccccggcaaagagagcggatgtcccgatttcatcctcttttttgcttcatcagacagattaattctctaaataattgattagcaaacagaaaatcattaaatttgtcccatcaattgaaattacgtaattatcatttaagatgaaggaagaattcgagctaatcgccaagactttccagggactggaagaagtactggcaaaagaactcaccgagctgggagccagcaatatagaaataggaagacgcatggtagcctttatgggcgataaagaaatgatgtataaggcaaacttctgcctgcgtactgccatccgcatcctgaaacccattaaacattttgaggcgaagaatgccgacgaagtttacgaagctatcaaaaccattgcatgggaaaacttcttggataaagataaaagttttgccgtagacgctgtggttttctcgaacgaattccgtcactccaagttcgtggcctataaagtaaaagatgccattgtggactatttccgtgaaaagacaggagagcgcccctcggtacgcatcaaccatcccgatgtggcactgaacatccatatagccgaagataaatgtactctgtcactagatagctcgggtgagtcactccaccgccggggttatcgccaggaagccgtagaagctcctttgaatgaggtactggcagccggtatgatcctgatgaccggatggaaaggcgaatgtgatttgatagacccgatgtgcggttcaggaacaatccccatcgaagccgccctgatagcacgtaacatcgctcccggcgtattccgcaaggagttcgcttttgaaaagtggaacgattttgatcaggaactatttgaccgcatctacaatgacgactcacaggaacgtgagttcacacataaaatttttggatatgacaacaatccgaaagcaaatgaaatcgccactcacaatgtgaaagcagccggactgagcaaggaaattatcttaaaaatccaaccgttccagcaatttgagcaacccaaagaaaaaagcatcatcatcaccaaccctccttatggagaacgtatctcaaccaatgacttgctgggcctgtatcaaatgataggcgaacgtctgaaacactctttcaccggcaatgatgcatgggtactaagttaccgtgaagaatgttttgaccagattggtttaaagccttctataaaaattcccctgttcaacggttcgttggaatgcgaattccgcaaataccaattattcgacggcaaattcaaagaattccgtagtgaaaatgccgatcgggagttcaagccccgccgagaagaaatccgtccgcgccgtaacacggaaaaagtagaatatggagaacgcagagaacatcgtagttttgacaacagacgtgaaggacacggagagtacaaaggaggagagcgcagagaaagacgctcttttgatgacaaacgtgagagacgtggcgatttcaaaagaggagaacaccgcaactttggtgacaaacgtgaaggccgcgacaatttcaaaagcagcccccgtaaatttgacgacaataaggaaaagacagaagaataaacagttatgagaaaattaatcaatctgatcgccttattaatcatggcttcatctgtaacatgggcacaagacaagaaaagtttcacactggaagacttgatgccgggaggaaacaattactataacctgcttccacagaatctgtatggtttgcaatggtggggggatgtatgcatcaacgccgacatagaagaggtaaaaaccatccatccggcaaatggaaaggaaaacgtacttatcactttgcaggaagtgaatgaactgttggcaaacaagaaattagggaaaatcaaccacttcagaaatgtatctttcccatacgctgaaaagatgatgttggtaaataccacatccaataaagtgctgatcgatttaactaaaaaggaaataatatggagtcagcctctctctcctaaagccgccaaccaggactggaacaaggaaagccgttcattggcttatacccttgacaacaatctgtttgtaacgactgccgacgggaaaacacaacaagtcaccgatgaaccgaaaggcatcgtatgcggacaaagcgtacaccgtcaggaatttggtatctcaaaaggtactttctggagtccgaaaggaaatctgcttgctttctaccgtatggacgagagcatggtaaccgattatccacaagtaaatacctccacccgcatagcgacactggagccggacaagtacccgatggcaggaatgaccagccacaaagtgactgtcggcatctacaatccggctacccaaaaaacagtttatctgaaagccggagaccccaccgaccgttatttcaccaatatcagctggagtcctgacgaaaaaagcgtttatgtcattgaactgaaccgtgaccagaaccatgccctgctatgctgctatgatgcggaaacaggagagccactgaaaaataaccccctttacgaagaggagcatactaaatatgtagaacctcaacatcccattgtctttctgccttgggaccacacgaagtttatctatcagagccagcgcgacggctacaaccatctttacctgatggacaccaagacttccatatatccggaatcacatggagccgcggccggaggttcttaccgggaaagctacaaaaccagacagcttacccaaggcaactgggtagtacaaaacatcctcggattcaatgaaaagaccaaggaagtcatcatcatgagcacagaggtttcccctttgcagagcaacgcatacgctgtgaatgtaaagacaggcaaacgccgcctcatcggcaataaagatggtatgcatcatgtacaactatccggtagcggcaactatgtaatagacaattatacttctttcaccattccccggaatatcgagatcgttcccacttccggaaaggaaaagactgtcagcctgttgacagctaccaatccgatggaagcatacaatatgcccgaaatcaccgtcggtaccctcaaggctgccgacggcaagaccgacttatactaccgcctgataaaaccggtaaattttgacccaaacaaaaaatacccggccgtagtctacgtgtatggcggtccacatgcccagctaatccacaacaaccgcaactatgacgcccgcggatgggatatttacatggcacaactgggttacgtcatgctgaccgttgacaaccggggcagtgacaaccggggactggaatttgagaactgtacgttccgccaattaggaaccgaagagatgaaagaccaagtgaaaggagtggatttcttaaaatcgttgggttatgtggacaataaccgcattggcgtacacggttggagtttcggtggtttcatgaccaccaacttgatgctgacttaccccgagttattcaaagtaggagtagccggcggccctgtcatcgactgggcttactacgaagtaatgtacggcgaacgctacatggatactccacaaaccaaccccgaaggctacaagaacgccaacctgaagctgagagccggaaatctgaaaggacgcctggaagtgatcattggcgccaatgaccccacttgtgtccctcagcacagcatcagtttcctccgtgcctgcattgatgccgggacccaacccgatttctttatgtatccgggcgacggccataatatgttcggacgcgatcgtgtccacttgtatgaacgcattacacgctattttgaagaccatttaaaataaacaaaagataagattatgaaactgttgctattaggctcaggcggacgtgaacacgccctggcatggaagattgctcaaagtcccaaaattgagaaactatatatcgctccgggaaatgccggcacaagtaatgtaggcgagaatgtagcgattaaagcagatgactttacagcaatcagggagtttgtagtaaagaataatatagatatggtagtggtaggtcccgaagacccgttagtcaaaggaatctatgattatttcaaaaaagatgaagcgctgaaaaacattcctgttatcgggccttcaaaagcaggtgcggtactggaaggcagcaaggagttcgccaaaggcttcatgcaacgccataacatcccgacagccggttacaaaagtatcactgccgcaaatctggaagaaggattagcctttctggaaacattggaagctccatacgtactgaaagccgacggtctttgcgccggaaaaggcgtactgattcttcccaccttggaagaagccaaggaagaattgaaaaaaatgctgagcggaatgttcggtaacgcttccgccaccgtagtgattgaagaattcctgagcggtatagaatgttccgtattcgttctgaccgatggaaaaaactacaagattctgcccgaagcaaaagactacaaacgcatcggcgaaggcgacaaagggctgaacaccggtggtatgggtagtgtatctcctgttccgtttgccgacaaagcatggatgaaaaaagtggaagaccgtatcatccgccctacagtagaaggactggcagcagaaggcatcgactataaaggctttattttcttcggcctaattaatgtaaagggcgaaccgatggtcattgaatacaatgtacgcatgggcgacccggaaacggaaagtgtcatgttgcgcatcaagagtgacttggtggaactgcttgaaggagtggcaacaggcaatctgaatgaaaaagtcttggagatagacccccgttcggcagtatgcgtcatgctggtatccggcggatatccggagcattatgacaagggatttgccatcagcggaatagaagagattgaaaacagcattgtattccatgcaggaacggcactgaaagacggccaggtagtcactagcggcgggcgtgtcattgcagtcagctcctacggcgccaataaagaagaagccttggcacaatcattcaccaatgcgaagaaaatcaatttcgacaagaaatatttccgttctgatattggattcgacctgtaatcagcggactattaacccatggcaggctatgacaaattccagacagatatggcaaagggaagattcaccttccctgttgccatccttatatgcctgcttctccggatcatcaccggcaatgaatggcaggatgtaatcaatttgctagtctgtgctttgactgcttatctgctgatcgagataaacaccgccttcacgctgatacggacacgcagtaccttgcatgtcagcttttatatattcctgtccacaacctgtctgtttctgcattccttccagtatgccgtttttgtgccgctcgcctttctgatcgctacttcccaattattcagtagctacgaatctccctatccggcgggaagtatattccacgctttctttttcatcggactgggaagcctgttgtttccacagttactttattttgtacctctgttctatttgggaatgattagtttcagatccctgtcactcaaaagtttctttgccgggcttacaggactctgtatgccctactggctctttttcggttacgcgttctattacgacaaaatgaatctcttctatcaccctttacaggagcttattcattttcaacccatcagttatgggacattaggaatggacaggatcatatcctgtggaatcatcaccttgatatcactggtcagcagcgtgcattatttccatgtttcttatttagataaggtgcgcacgcgtatattcctttctttcctgatcaccgttgaagcctggatttatttactgggtatcttacagccacagcatttcgacatcctgttacagatgcaaatcattgtagggtccattttaacaggacatttatttactttaacccacaaccgctttaccggcatctttttcatcactacatttgttctattaatagttctaactatatacaatttatggatgcaattcttcaattcctgatcgactggggatattggggcctttttctaggctcttttatagccggaagtgttctcccgttcagctcggaggccgtactggcagcctgtgtcggtccgttgggcttagacccggtgatcagtatagctgccgccaccgccggcaatgttgccggcggcatgacctgctactggatgggacatctgggcaatatggaatggatcgagaaatattttcatgtaaaaaaagagaagatggaccgtgcggagcggtttgtacacggacggggtgcctggatggctttcttcgcctttatccctattttgggaagtgccatatccattgtattgggcatgatgcgtgccaatatatggattgtcattctcgctatgaccatcggaaagatactccgctacgccttattggtatggggggtattggaagcctccgctttaatgcattaaaattatgaaactggaacaaacagcagatggaagttataccctctatgtacccgaactggacgaacattatcattcggtgaaaggggcactgacggagtcacaacatatctttatcgaaatgggattaaaacattctcccgtttccgagccccacattctggagataggactaggaacagggctgaatgcctttctgacactgctttcagcagaagaaacccgacggaaagtacattataccggtatcgaacgctatccgttagccgaagaaaccttgaaacaactggactacccccgcctgatcggcaaacagcatgaggaggattattacgccatccaccaggcaccctgggacacggaaacagaggtatccccttggttcacattacataaaattgaagacgattttacccggcttttcaacccggtggaaggcagccgccctgccgttcccttatacgatatcgtctactttgatgccttcgctcccgaaaaacaacccgaaatgtgggaacaatctctcttcgatactttatacaaggtattgaatgacggaggtatcctgacaacttactgtgccaaaggggtggtaagaaggatgttgcaaacagccggattcacagtagaacgccttcccggccctccggggggaaaacgcgagatactgcgggcaaccaagtctgattaaacttctaggaccgaaactgataaatggtcaagtttcacctaaaacagtaaaaccgttgtaaaatccttcaaatccgtcatatatgcataactgcatatttatcagcaaattaccatgaaacattcatcgctgaatccgtcatagattcttcatattctttttccacgctgagatgattgccgttatatacataaaaaatctccggcttatcacaagccagagattctgttttataaatttaaagtttttattatataagattctcccgtcggagaaagtcttatcttggaattgttagtgagagtgccccgaaagtcactctcattttttaagactctactgttagaaacaattagttcaaagtctgtacatagaatgtcaagtctttagtcatgccaaatacatctgtgatatgatatgtgatttcgataaccttaccattacctacttccttggcaatatcaaacttcatcttgttggtattggcagtttgagcagcaccgtctaagatataagttaccacatttgtagcctgttgatccatcttggcagaaggatacaagccatagaatgaaggatcagccttatctacaacaatgctttgtctgttatttaccaatgaagagttcaattcggcacgtaatgcagcagttacaccttgtgcggcagcacggtcaaacagatagtacggtttgtcgaatgcatcagccaaagtgaaatcagtattgcttacttcgaatgcatacttcaaaatggtctgcaaaccatctgttgaataaacagcttttgcaatgaacggattctcttttgtacccttagatgctacttttgcaaccttagagtcagcaatacggctggcgaactgtaatataatatcatccttagcttctgtataaacattgaagtgatgatatttaacatcggtcaaagtatatgcatccatgttaccggctgtgccatagaagccgattgtattccattcagtatataatgagctatttgagatatcggcaagagttacatagctttcattagtcttaccaataatttggaacgagttagtcggaaccaatacttcataccagttagcttcaacatttgcttgtgcattgtaagcaccattctggtaattataaactcccttgaatgcatcacgcatatcagcagcaacagcatcatagcggtccaacagtttttcaccatatactttcaatacatcatttccgtctttgtctttagaccaagcagacgtacggttagctacagattcacgtttgatcgggcagttagtaggcatctgcaattcgaatgagaagttcattcttgccacttcgtattgatcataacgagttgcgatttctacacggaacgcgttgtccaaaggcaatgcaatcttcgtgttgtcaccactatactgacaatcgtctgttgtgtaataaggagcagttacatgtcctcctaattcactgtcaaccttgaatgttaccttcaatgcggtaatcttatccaaatcacggatgtttccggtcagacaagacttgccggttgcgtctacataatcaaattcaatgtatttgtccagcaatgcaccattgtatgcaacacggtcccaagtaccttggttgttgataggatcaccaccggtcagttctacattgaagtcaaggtcattgctaccatatttcttatcgaatacacttctgttgatttcttgtggatcggttgaattacccatgctgcgtgcaatcgcatcaatccatttcatcttgcctgcatctcccaaagtattgaagaattctgtcaagtcaagtgccttactccatccataccatctggtttgatcggcaataaccgtagcattgaatggcgcaacgatatcttccaggaacttgtcaggaacagtcacagcctcatcattaaagttgacagagaagtaagtcttacctttctgaccgtttatcaagatgtagttgtaaatgaacggaatagtattgttcactacagcttctttcttagcgatgaaacgataaccgtcttcagtaatctccacaccatattttctgatggattcatctgtaatcttactcttgtctatttccagatagtagtcgtataccaatacagagtcttctgcccattgatcatagccgtcagaactaaatcctagtatatcgaaggaaggagtatattcctttccatacaagaatgagcttcctgaaggagcaaatgtcaagccattaatgtaaatgttttcagttgcgtttacattgctggctttgaatgtatatacaaacggggattttactacttctccattattttttgatgtagctttcagtgcaaacaggtacttgtcaccatcattagccttgaactggcctgcatagtcaggacgtccctggcttccggctgcatccaaatcccatttctgtacgtcacgaggcagtaaccacataccgttggccgatgtagcacgggtagctgtagtagctttgccggtccatgcttggggagcaccaaaattcaatccccaaggagtggtgttgtctgtagatacaaacgcccagtcataagcgtcagcatcagcacctgcgggattcacttgcatcttgatgtcgcggtcggcagtaggatacatacctttcaacattttgccgtttacagctttatgtcctgcccaatccacgtcattattcaatataccataatagatatcgaaatcttgagcatagttttgtccgttcagttcaggaataatgcttaacaatgcagctccacccggaataaagatagttttcggctcaccgtttgcttctgttacagtaaagttgtaaccaccggcaacttcaaccactctcagaccaccggcaatatattcggtatccacgtatgcacctttttcagcatcccatacctgccaataaccagtttcctcgttcactttggcatcgtgtccggcagcggcagcatcacccggttcgccttggtcacctttgtcacccttatcacctttggcaggatattcagatttcacaccgtcaaatgcccagtaaccgtcgataatggtcacaactgtaccattcttaccgtcttcacccttgtcacctttaatagtttcaatggtactcgtagagttgtcactccaggttacagtgataccgtcaccgttcttcactacgttggtaacatacttaccagcatcaacttttgcctgtaaagctgaaagagccgacttgatatcgaccagttccttgtcgatgcggtcaatgtcctcatcatagtctttacaagacacaaatgttcctgttgacgaaaccattaaggctccgaacagaactgcacttaaaaactttttgttcataaataaagatttaaatttataaatttaaaaaactaaaaattggttatacatatactgttataaaaggacttcattctttatttccaagtttaccagattcctctcgcgcgccgcataccgtttcggtgtcatacccgtctgacggacgaaagccagatagaaaggactcttcgagccgaagccactccgtgacggaacctcacccagcggacaaccgccgttgcgaagcaactccttagcgtattccacccggtagcggttaagcaactccttcaggtgacaaccgaagtagcggttcaccgcattgctcaggtaagtctggtttgtttcgagcatcacactcagtttctttaacgaaagagaggaatcaaggaatgcccgacgtatctccaactgatacaatatacctttatatataaggctgtctgccggacgaacatccgacagtgacgagaaccgcgccgtccactcgcgaccggcggcacgatagagcaatgccttctgccttacagaagtgccgctcgtctttttacgtctcagaaacaggtattccatctaaactcgttattcgttcttattggctttttatgcagatctcttagtaagagatcgacaaacagacgataacaagctttaaatcaaaacattaactatacacatacaaggttaaaccagagctggcagaactagaagaaatactttttttcacaatattccatattttttccgcgaaaagtgtactagttatcaaaactttccttatttttgcacgtgaaatgtcgatctcttactaagagatttatattttttcatcttccagacatataataacttattgattttcaaccatccacaactaatccctacttcctcccttaacatatagtaagataaatacatgaaacaaagattgaaaggatttttttacaattcttagtcttcatgaatacgagagccttatatggcctcttaaaaagattgacaaacgataagacacttcccacaaaatataaagcgcatatttatagagaactataaagactacatagaatgccatatagaatctcttacctgaaactaaggcttctcatacagccacagagcaaccgtatgaaaagccttaaccaaactgaaattgcttatcaattgagcaatttgggaagtatttgtacctgattaatgagcaatttgcgtatatttgttgttgttaaacagaaaagataacattcatgagaaccagacatcacatattttcccaattgcatcccggtaaaagtatcctttgttcatgctgcatggcactgatagtgtgcctgtttaccgcctgtgacagtaaacagcccacttccagaaaaccgaccctgactgtcaccctggagcccttgcgctatttcacagaaaccgttgcaggcgataaattcaaggtagtcagcatggttccgaaaggaagcagccccgaaacctacgaccctaccccccagcagctggtcaatctggataagagtatcgcctacctgcgcataggctatatcggttttgaacaagcctggatggataaactgaccacgaatgcccctcatctgaaaatattcgatacttcaaaagggatagatgtcatacaggaagcaggatacaaccacggtgaccatcatcacgaaggggggatagagcctcatatatggaactccgcacgcaatgcctcagtaatcgcccgtaatatctacgccgccctgagcgaactggacagtgcaaacgagccctattacaaacatcgtttggacagtctgcaacaaattatcgcacagacagacacggaagttcgtaaccggctacagaatgccgacaccactttcctcatctatcatccggcactcagttattttgcccgggactatggattgaagcaaatcagcattgaagaaagaggaaaagaaccctcgcccgcccatctgaaagaattgatagaaacctgccgccgggacaatgcccgggttatttttgtccagcaggaattcgatacgcgcaatgccagactgatagcagatgaattggggattaccgttgttcccatcaatccgctaagttacgaatggcaggaagagatgattaatgtagcaaaagcacttgccaaataatacagccttatgacgaatcccattatacaacttacagacatttccgcttcttacgatgagaaaacagtgctaagccatatcaacctcaccgtatatgagcatgacttcctaggtgtaataggtcccaatggtggtggaaaaaccacattaattaaaatcatactaggattactaaagcctatttcaggcacaatccgtttctataaaaatggaaaagaaatacccgagatagccatgggatacttaccacaatacaacagtattgacaagaaattccccatttcggtgtacgaggtggtattatcagggctcaacaagcagaaatccctgttccaccgctacactcccgaacagcacgaactagtgaaccggattattgcccgcatgggattggaaggtttggaaagccgtgccatcggcgaactgagcggaggacaactgcaacgcgcgctcttgggacgcgccttggtttcaaatcctgaggttgtcattctggacgaacccaatacctacattgacaaacggtttgaagccaaactctactccctgctggaagaaatcaacaaggaacgggccatcatcctggtaagccatgatataggcactgtgctgcaaaatgtaaaaaccatagcgtgcgtcaacgaaacgctggattatcatcccgatacggaagtacccaccgaatggctggaagagcatttcggatgccccatcgaactgttaggacatggaaacttccctcaccgcatcttgaaatgccatcatcacgacgaataaatccgattatcgtgacctaagtcttttcatgcggcaggttaagccctatccaccttatcattaagcattttcttacggcaggcttctacagtcgccggcagtggtccgtacaatccattgcaacagaccgtacggaccactatagcagactgtacagtccactgtagcggtctatactagtttaccgtataaaagaccttaacctagccattaatcaagcttaatcatagagtagaaaaaggttaggaatccaacgattccctccatctgcacaaactgaaatttcagaacacagcatacaaaccagcaataaaacatagaaattccgttaaggactgaaagaaacattttctgccgcatccccgaaggataacactaaataacagaccattgtacccctattccaactttctttcgtatctttgcgcccattgaacgttaacgaaacaataatatattcatgaaacagtacaaattagtcaacaacctggtgggttggttcgcttttgtcatcgcagcttttacttactgtatgactatagaaccgacagccagtttctgggattgcccggaatttatcactaccggatataaattagaggtaggtcacccgcccggcgcacctttctttatgcttaccgccaacttattcagccaatttacaagcgaccccagtcaagtagccagaatggtcaataccatgagcgctctgatgagtgcggcttgtatcctattccttttctggagtataacccatctggtgaaaaaactgatatgccccgatgacaaggagatgaccttaggcaaactcatcaccattatggggtcaggactggtaggagccttggcttatacatggagcgacaccttctggttcagtgccgtagaaggtgaggtatatgcttactccagtcttttcaccgcagtagtcttttggttgattctaaaatgggaatccgttgccaacgagcctcacagcgaccgctggctggttttgattgcttacctgaccggactttccatcggtgtgcacttgctgaacttattgtgtattccggccattgtactggtgtactattataaaaagaatcccgatgctaacctcaaaggcagtctgttggcacttacaggctccatggtgttggttgcagcagtgctgtacggtatcgtgccgggcgtagtaaaagtgggaggatggttcgaactgctgttcgtcaacagtttcggtatgcctttcaacagcggtctgattgtatatatcattctactcgccgcatccattatttggggtgtttacgaaagctatacggaaaagagccgcaaacgcatgaatatctccttcatggtaactatcgccatgctgggcatccccttctatggctacggatggagcagcgccttgataggcattatcatactaggaatcttgggcgtttatctgtttgctgatttgaacaagaaatatcagattagcgcacgtactttaaatacctctttgctgtgcatcatgatgattatggtaggatactcctcgtacgcattgattgtgattcgttctaccgccaatactccgatggaccagaattctccggaagacatcttcactttaggcgaatacttgggccgtgagcaatatggaacccgtcctttgttctacggacagacatacgcctccaaaccggcactgaaagaagtggacggaggatgcgtatatgatgtgacggaaggcgctcccgtctatcaacggaaggagaaagcgactcccgatgaaaaagacagctacgaagtagtgcgtcataagaccgattacaagtatgcacaaaatatgctcttcccacgcatgtacagcgacgcacatgcacaagcatacgaagactggctgggtggtatacagggcgtacaggttccttacgaccagtgcggacagatgatgatggtgaaagttccgacacaatgggataacatcaaattcttctttatttaccagttgaactacatgtactggagatattttatgtggaactttgccggacgccagaatgacatacagggacaaggtgaaatagaacatggtaactggattaccggaataccggtaatagacaagttcctggtaggtgaccagagcatgttgcccagtgacctgaaaaataataaagggcataacgtgttctattgcttaccgttgatattaggacttatcggtctgttctggcaggcttacaagacaagacgtatcacgactcccaatggggaagaaatagaagaaccgataggaatccagcaattctgggttgtatttttcctgttcttcatgaccggcctggccatcgtgctttatttgaatcagacaccgatgcagccccgtgaacgcgactatgcgtatgcaggctcgttctatgcatttgccatctggataggcatgggtgtggcgggtattgcccaatggctgcaaggcaaactgggtgagaaacccgcttccgtcattgcaactgtagtctgtctgttcgtacccatccagatggttagccagacctgggatgaccatgaccgtagcggacgttatacctgccgcgacttcggacagaattatctgagcaccgtacaagaagaaggcaatccgattatctttactaacggtgacaacgatacattccccttgtggtacaaccaagaaacggaaggtttccgtaccgatgtgcgtgtatgtaacctgagttacctgcaaaccgactggtacatcgaccagatgaagcgtcaggcatacgactctccggcagtacctatcaactggagccgtctggaatatgtacaggggcataatgaaggagtggctgtacgaccggaagtgatggaaagcatcagcaacttctacaaacagaatccggaagaagctgccaaggaattcggagacaatccgtatgaattgaagaatattctgaaatactgggtacgctcacccaaagaaggtttacaactgatacctacagacagtattgtcatcaagctggacaaggaggctgtgaaacgctcgggcatgatgattcccgactctttgaaaggtgagattcccgattatatgagtatctcattgaaaggcaaacgtatgttgtacaagagcgaactgatgatgcttgaaatgctggcgaacaccaattgggaacgtccgttatacatggctatcacagtgggcagcgacaaccatctgaatttaggtaacaacttcatgcaagaaggtcttgcctaccgcatcactccgttcaacaccacccagctgaacgcacgcatcgacagcgagaaaatgtacgacaacctgatgaacaagttcaagttcggaggaatcaacaacccggatatctacattgacgaaactgtgatgcgtatgtgccagacccaccgccgtatgtttatacagctggctacccagttgataaaagaaggcaagaaagataaggcgttgaaagttcttgactattgttcggaagtaatcccaagcactaccgttcctcacgattacatcatgagcagttccaaagagatggccgacgattatctgacattgggtgaaaaagagaaaggtgaggctattctgaatgatttggcaaacaaatcggtggaatacatcacctggtacctgagtctgaatgaccaacgtctgcaaggttcatacgaggactgtctgcgcaatttctatattctggatgaaatcaacaagagccttgcccgcgcaaatgctgccggcggtgtacaaggtgaaggcgaacaacagaataaatcggatatggcaagccactatgccaagaagtttgaagagctctatgaggtgttcaacaaacgtgtaggcggcggagcaggcagaaagtaaataaaaggtgtggattctgcggtgaatccacacctttatatttgtataaccaacaaaagcacacacattcatgtttatagaacaacccccactgatactccgctggctttatccacgcgccttctggcgaatggacaagaatgaaaaagcggtctatctgactttcgatgacgggccgattcccgagatcacaccgtgggtactcgatttattagacaagtacaatattaaggctaccttctttttggtgggcgacaatgtgcgcaagcatcccaaggaattccagatgattgtagaacgaggacatcgtttaggaaatcatacttttaaccatatccggggattcgaataccgaagcaagaattatctggccaatacggacaaagcaaacgaactgatccataccaacctgttccgtccgccacatgggcacatgcgctggatgcagtacatggtgctgcgccataagtatcaaatagtgatgtgggacttagtaacccgtgactatagcaacaagctgaatgggaagcaggtactgaggaaagtaaaacattatgtgcggaatggttccatcattactttccatgattccatcaaggcagagaaaaacatgaaatatgccttgccccgggccatagaatggctgctggaacaaggctatgagttcaaggtatttgactgataaggccaaataccttgagttatttacttagtatatgtaaatcccagtttattcaacccattctgtacatcgggatgactcataaacagtttccataacaatcccgaacgataattctctatcatcactgctatagggccctggtcaatagccagataacgtttcggataccagttatccgtttcactgaaagcatcataaaagccatacgggccgaatactttctcacccattccatacagatgacgcattacctgcaaagaatattcaggagtatagacaatagaggataaagcggcagtcggagagatcactcccaaatcttctttctcattaggagcgtgtgccgcataaccgtttaccgaataactggcagtcaatccccaacaatccgggccaaagccggtataatgcttgggattacggatgcagtaggcacggttgaccaaggtaagattacgcatttcattgaaataactgggacaatatttatcctgcaaaccattgggattcatgcccagaaaagaatattgcgcccagaacaacggtcctgcttccgtaccctgataacgaagatgtaatttaatcccctctaccgtatgaggagaaacaatctgtccattctgtgcccagccctcattataaaccgtggcaggtatcccatgagtaggagaagcagcagccagaatatacataatcatacattcattgtatccatgcaccggaaagttcatggcccagccatctgtggggctccaatgccaataaagcacattttgcccgttctgacggtaaaagttccagtctacctcacgccacaatttatcaatacgtgccgccaactctttttcatccgaagtgccatttacataatattgatgcacagccagcaagccttgcatcaaaaaagcagtttccaccaagtcaccgccattatctttggaaccgaaaggcaatactttgcctgtctcaccattccaccagtgaggataagccccatgaaaacggtcggctttctcaaggaaagtcacaatcttgtccattctttcgagcccttcctgccggctcacatagccccggtctataccggacagaatagccatgatgccaaaaccacttcctcccgaggttaccacctcgggtcctcctgcgggatatacattatctatatgataacgctcacgagccataccgctataaggttcgcccccctcccagaaatattggaaagtacgacgctggacagtatccatcaaagcatcatcggaaagcgtgtcggacgccgatgccggacgcttgtcagaagaagctgccggcttgtttttacaagccagcaatgagaaaagcagcaacaccgctgcacataagggaattcttttcattttttcacaggtttaggttagtgcagcacaaatgttgctgttttcacatgctggctgtccgtaccaatcatcaaatcgaaagctccgggttcggccacgtattgtaactcgtaattataatatttcaataaatcgggagtaatcttgaaggttatctcacgggattcacctgctttcaggaatactttttggaaacctttcagttcttttacaggacgggtactttcagctaccttgtcacggatatacaactgcactacttccgcaccatccctgtttcctgtatttgtcagtatcactttagctgtcagacttccgcccataggcattgaagtacggtccaacgtaatatctccatagttgaaagtagtgtatgaaagcccataaccgaatggataaagcggttcgttgtccacgtccagatagttgctacggaatttctcaaaccatttcccttcgtgcagcggacgtccggtattcttgtgggcgtagtacaaaggaatctgccccacattcttcgggaaagtcatagtcagttttccacttggattaatagcgccaaaaagtacgtcaccaatagcataggcagcttcgctacctccaaaccatacgttcagaatcgcaggaacatgagcctgttcccactccaacgtcagcggacgtccggtgaaaagtaccaaaactacaggttttccagtttttagcagttccttcaacaaagtacgttgtacatcggggatatccagtgaagtacggctgctgctttcaccgctcatttctgaagattcgcccaaagcagctactatgacatcggctttctgagctaccgtcaatgcttcttgcaacagttgggcatcggtacgggcatcccgatgaaggctgcgcccgaagagagtcgcccgttcttcataggcggcatcactggtcagattgctgcctttagcgtatgagatggtagcttttccgacagtcatctctttcaaaccttctatcagtgaaggggatttatccagtatggcagccacgctccaagttccgggcatattggtacgagtatctgccaacgggcctattacggcaatattaccctgcatcttcaaaggaagtacaggttgcactgtgcttccggacggattcgatcccaccctatcggtagaaggttcgtttttcagcaagacaaagctttctccggcaatgcggcgggctacggcacggtgttccggagtgaagatatcacgtgcgggacgtttcagatcacaatatttataaggattggcaaataaccctaatttatactttgcctccagaataagacgacaggcagtatcaatggtctgcatggatacctttccttcctgcaccgactgtttcaatgttcctacaaaagcatcgctcaccatgtccatatctactccggcattgacagcacgggcagctacggtttgcaaatcaccgattccatggtctatcatttcatagattccggtatagtccgtcaccacaaagccctgaaagccccactggttacgcagcacatcagtcatcaaccatttactggctgtagccggaatgccatccacttcattaaaggaagccatcacactacccactccggcatcaacagctgcctgataggggagcatgtactcattgaacatgcgttgacggctcatatccaccgtgttataatcgcgtccggcctcggaagctccatacaaggcgaaatgcttgacacaagccattatctcatcattgcgtttcatctggccgccttgatagccacgcaccatggctttagctatctcagcacccaggaacgggtcttctccactcccttccgaaacacgtccccaacgaggatcccggctaacatctaccatcggactgaaagtccaggagataccatccgcactggcctcaatggccgcaatacgggccgattcctcaatggctttcatatcccaggtacatgacaagcctaaagggatggggaaaatcgtttcataaccatgaatcacatccataccaaacagtagaggtatccccagacggctctctttcacagccagttcctgcacatccttgatacgggcaactcctttcaagttaaacagtcctcctacttcaccccgttttatacgggctgagatatcgctgctctttgcctgtcccgtagtgatttcaccggtaacgggcaagttcaactggcctatcttttcttccaaggtcatctttttcatcaaattatcaatgaaacgattcatatcctgaggtgatttctgcgcatgcacactcagggtggcaaatagcagcatgggagccacttgcttcattctttgaaatattctattcatcatcttaaataatgtgctaatgtgtcaatgtactcatgagcctattgacatattgaataattataaataatcaggattctgtttcagcactcctttcgacttgtctatttcatcctgcggtataggcaaaagtgcattcttcggttgataattcaacttacctgccgcatgaagaacttgctcagcgattccccaacgtaccaaatcatagaaacggtcgaattccagtcctaattccaccctacgctcgtgtcggattgcttcacgcaataccgattggtccaaagaagtaatttcaggtagtatatccggattaccgccacgcgcacgggcacgcaccatctccaaatccttttgcgcttccgaagtattacctaactcgtttgctgactccgctgccattaaaacgacatccgagtagcggatcagccggatattcacccaaaagcctttattggtaaactcctggcgcaatgccggattggtataggctttcttgttgaagtaagcaccttctgcctgcgacaccggggactctccgtatggtgtattggtattctccggagtaacagggtcggaatcactcttacggaaataaagcaaggtggcatccttacgggggtcaccaggctcaaaagcctccgccatcagttcggtagccatgtgccatccccaacccaaatcccattttccggaaccacgaatcccctgtacttcacagaattggcttcctatcttatcactttgcggcaaggcggccgtagacaagcactgcaactcaaacaccgaaccaccgctgttctctccctcgtcagtaaaaatcttatcgtaaggggtatccagattataaattccttttcccattacatccgaggctgctttgtacatattctgccaatcattgcgcatcatataggtacgggcatgcagggaacgggcagctccccacgtcagacgtcccaaataggcagccggccaccgttcgggaagcaaatcttccgcatctttcaagtccttgtctatctgttcataaattttgtctaccgttgttttgggtacattagcctccgaagcttcatttaccttaaaggtaaccaatggaacctccccgaaggctcgcactaaattaaagtaacagtaggcacggaaaaataacgcttctcctttattatagaggtcattctcttctgtcagatgaccggtctcaatggcatccaccacctcattgcattgataaataatcgcataattctgactccaataggcctttatcaacccattgctggcattgtactgaaaatcatcatacattgccgcctgttccgacccgtcgctggaaatacttcctttctccgaatcttcggaacggaaacaatgaatagcgaatgcgggagttcctgcagtaatattgaaattacgcatcatggtatagatgttgaatatctttccttctgccaatgcaccgggattatcatcctccgtgaactgaccttgaggactacggtcaaggaaatcattacaaccggtaaaggccaggattcctccaatcgcccaaatgtatagtatatatttacttcgtttcataatcaatcaaaatgtaatattgagtccaaatgtataaatcgcaggtaccggataacttccattatccacaccaaaagcaatggcagaaccaccaaactcaggggtgtagccggtattatgtttccaagttttcaggttctgaatattgaaataggctttcaaagccttcaaaccgattttggatatcaggaccttatcaaaagtatagcccaattgcaggttacgtatacggaagaaactgccgtcttctacataatactccgaattttcaaagttaatggcatgaccggtattcagaacaggttgtgtattggatgtaccttcgccgtgccaacggtccagacgctgctccatatagttgaactgcgcccaattgtaattgtcccaagtacggtaaatctgattaccgccttgtcccatcatgtcaatacccagttcccaacctttataggaaacacctaatgagattccataggtaacatccggagtaggatcaccaatcaaagtacggtctgccggtgtaatctcaccatccccattcacatcggcgaacttcaaatcaccgggagtcactgtagccagtgtattcttgggcgaagcatcaatatcggcctgtgactgataaacaccatctaccttatatccatagaagaaaccgatgggataacccgccatagtataactctggctcttgtctccggcaataatggaatagccgtcttgtaccagactcttcaccttattcttgatagtagtcaggttgactcccacattatacccccaatcgccaatctgatcccgccaagtggcagacaattccacccctttattctctatctgtcccagatttcctattccgggaatggttccggaaagtccgggaacctttgccagcaggtccttcgcattctttttatcctcaaatccgcaactacgcgcctaatatgatacagaagcgaaaagaatctgcatcgttagtaaaaagggggcacagtgcatcgaatgtcaccataaagacatataaatgccccttaccccaccatgcgacttgaggcaatacgcaaaatcacgactataagttgtcggtgttatccaaagtcattctggaacacattggcataagcattgttgcatgaatagatattcagcacatacttccttgatgtcctgacccatttggctggcacagagatgaacttaaagacaaacgtcttgatgcggcttgttgctttgagtccgaacctcttcacgtcaagcctcgccatgatgaatttatagaagttgcgtatgagtgccataagcagaagaaacaccgtgttttctcccataaaggattttggaagcctgttccagccgaatccgttattcatatcatcgaagatgcgttccttccctccacggaggttatagaattcgacaatctctttctcggaagactcgtagtcatttgtaaggatgcagcggtaggtgtattctccttcccacaggtcgagttcgccgtctatccgcttctgtctttgaatcacaagacggtatgccttccctttccatttctcgatgagaatggaggccagctcaaactcaatgccgcccaattccactttcttccaacctctgagggcaaagatgtcattgtagagcgaactgcatcggttagcacggatatagaaggtcttgcagtgtttagcaatctcttccactatctcttcagaacacgagccgcaatcagctctgaaacggttgataataagcttgttttgttcaaacctttcaaagaacctcttcagcgtgtccttctggtggaaacggacatttgtgttgccgtcgctgttctcaatgccgacaatcaagttgccaataaccgccacgccagggcgataaccaaggaacttcttgtatgtaggcttcgcatcaaacttctcagcctctatgaactggtggtcgaagtcaacgtcatacccctcgccctctttcagctgccctgtggacaataggcaattgaggagcagtgtattcagcttgtctgccgtgttgaagtcgtaggtcttgccagtgtcggatgtgtaggaaatgttatcctgggtcagttcctttatggctctaagaatcgtgtcggcactgcatgtgcgaagtgtcggatgaagcgaaaggtggtacatcagatgagtggtgacatcctcgatgcatgagccgccacaaaaataaacgctcataagcgaacggatgatttcgctgtattgataaccatacagcctgcatctcataccgagggttgagtcgattacagatgagagtctggagtcaaattgctccattattgaaaatattcctccaaaaggagtgagtttctcggatttaattgctacctttgccatgtctgtcgggtttgatacatattttgatttgcaacactaagataggtgaaaaatctgacatggcaaattcctgagcaactttttgttgctcaggtacttaaaaagttatatttgtaatagtgttgcggaattaaggtttataataaactccttccacatgcaggcggttgcgaaacatattcgattcaaagcctgcttcccaagcttccactttttcccatctaaggttcgcattaggcaaataggccaactgatagcccggatagatggtggacggattgccaaacacagctccaaaagcattttcaagcaacggctcagccggataagcagtatccagattctgattgcccaacgtaccccaggaacctttcaacttcaacatatccaaccaagaaatgtctttcataaactcttcttcggtcatcagccatccggcacctgccgagtaaaagttctgccattggttgcccgtatacgaaaaagccgaagaaccgtcccgacggaaagacccgttgaacaaatattttcctttgtaattataaatcacacgccccagaaaagaaacagtagtacgttcccactgtgtacttccattggtagctgtagccaaatcaccaatactgacgaaccatttatcgggattatcgggaataaccaatccaataccttgcccacgggcggcatccagacggctgagagaattgtaataagtagtgaaaccggcggttgccgtcagattatggtcgccaaaactatttgtataagtcagcacataatcactttgcaccttcgtttcattttccttgaactggctcacttcagtcttacccgttcccagtgtagccacatttcctttcactgtgttatcatataccttgataatcggctgataggtacgcccgttattcgagccgtaatccatagagaacacagccctgaaattaaaatgttccagaaaatccacctctccataaatgttacccgatgcacgataattctctgcgcgagtggtgttggcttttaaatccacatccaccatcggattcatcatctgtgctttctgaaactccggcaacgccgcatacaactgatattcttcattgaatacaggagctataggagtggtacggacagcattcaggactgatttactatcagcaggcagcatacgtgctccgttaaactgaaacccgacctttatcttgtcggttatcttatactcattgctgacattcaaggtgattttgctgaacttctcgtgctttatatttccttgttcgtatgagtatcccatccccagataaaaactatgtttttcagaagctcctgtcacactgatattattattggtaatgaagccattctgaagcacttcatcctgccaatcggtatcagcattccagccggaaaaatcaaaagcgggattcttttcattaacaagctgctcactatacaattctttgaactgagaagcattcaccatcttgattctgtccaccacatgtttccagccgaatgaggtgttgatattcaccaaagtctgcccctccttagccttctttgtagtgataatgataaccccattagctccacgcacaccgaaaatagccaatgaagacgggtctttcaacacttccatagactcaatatcctcgggattcagaaagttaatgttatcattgaacaaaccgtcgacaatgtaaagaggtttgtagccgttaatggagttcgttccacgtacacggatttcggggtccgagcctgcttgtcccgagttgataatctgcacaccggctacctttccctgcaaggaagacaagggatttgtagaaggtttattagcgatttcggctcccttgatattcgtgatagagccggtcaagtcacgcttcttcgcactaccgtaacctatcactactgtttcagccagcatttgtgaatcctctttcagctgtacatttatcacatgctggctgcctactttcacatcttgcttcaccattcccacgtacgagaattccagtacattgtcgggtgaggcggtaatactgtacttcccatctatgtcggtaatcgtaccattggaagtaccttgaatcactacggatgctccaatcagaggttcattggtcgaatcggttaccgttccggtcactgtcttctcctgagcaaacagcgacgtagtcatcaacagcagacagactaaagcactaaaagtcctcaatccctgccgcccatgttgtaaaggtttaggtttattgtccattgcattttctattaacaaataaataactagtttaatttcttatattgcaatgaaacaaaaggaaccggaaaaagatgtttaagacgagagaattaacactttaacatcccatgaaaaaaagttacccgaagagcatgtgctcctcggataacttttattattcttatatcaccattctatggtacatggaccaccaagggattacgtaccttctgagcgtattcttccaaatatttgttccaatcggtatcggcttcgaaaccatatttgctccagcctgatccccaataataaatatactcggaacccggttcataatcactgaccgacaacacatgacctaaagcacctccacgttctttctgctctttttcggagaacatttggggcagcgctccttttatattagccggaaatacagcacctatataaatcactccattgttattggctgcattctctgtagagtccgcataggctatataacctgcatttgcatcaaaactataccccgtaggattctgtttgtgcaatacaatgccggtcaccaccggagttgtttcctgcaaattatcaaaagaaaccacagtcttgttcaactgcgatcccttgtccaaagaaatgatacgcgtttctatcacatttgaatctccttttacaaccaacggattataaactaacttggtggtgaatcgaagcggaccgttatccaagacttcacaatccttgtaacaatagggataaacaatggtactatcggggaataaagctgctgtcccgccacccagagtcggacccaccgcataacaatccattccgtttccatgatctatgtgataagagattccttgattcaaatcaccgtcataacgatcttccaccaccggttcgggtacattcttggtccagatgtcataaccaaaggcacgctcgcccttctcctgcaaagcaggaccgtatgcacgataagcggcgcgatcgttttcccatgccacatcatccagacgctcgggatattgacgcccacaagcaaccacatccaccggctgtggagttccttctgcaattgtataagtaaccgaagctccccctttcaccgaaacaggaaagataagcatatcatcgtatgttatctgataaggtacttcaagcccgttctcgtccaatacgataacttgtgccgtatcgggtaattgtagtttgcctgttatttcagccatagagatttccaccatttctccattcctatcaatagaaagcggattggttatagtgacagtcaccggctccttttgcgaacaggaaaacatagctaacgccgttgcgactgctaaaaagatttttctcatactatttattgtttgtcgaactgaaagacaaaaatacaaagaatctgcaagtatcaacaaagacacaagcagattcttcctatttatatctactaattatttaggctgtttaccaatgtaggccagaataccgccatctacatagagaatatggccattgacggcattagatgcttcggatgcaaggaatacagcaggaccagtcaattcctgcggatccaaccagcggccggccggagtcttggcacagatgaatgtatcaaacggatgacggcttccatcgggctggatttcacgtaacggagcagtctgcggagtagcgatatagcccggaccgataccattacactgaatattgtattctccgtattcagaacagatgttacgagtcaacatcttcaaaccacctttagcggcagcgtatgcagaaacggtttcacgacctaactcagacatcatagagcagatattgatgattttaccatgtcctttttccatcatcgcaggcaaaactgctttagaaacaatgaacggagcattcaagtcaatatcaataacacggcggaaatcggcagcttccatttcgtgcatcggaacgcgacggataataccggcattgtttacaagaatatcaattgtacctacttcctttgcgatagtggcaaccatagcctgtacggcaggctcgtcagtaacatcacatacatatccgtgtgctttaattcctttttcagcgtaagaagccaaacctttatccaccaattcctgattgatgtcgttgaaacagatggttgcaccttgttctgcaaaagcagatgcaatagcaaaaccgataccataagaagcgcctgttacaagggcgactttaccttccaaagaaaaattcaaatactgattcatgatacttatattattaaattaatgaagttatattatccttaattccgcaacactattacaaatataactttttaagtacctgagcaacaaaaagttgctcaggaatttgccatgtcagatttttcacctatcttagtgttgcaaatcaaaatatgtatcaaacccgacagacatggcaaaggtagcaattaaatccgagaaactcactccttttggaggaatattttcaataatggagcaatttgactccagactctcatctgtaatcgactcaaccctcggtatgagatgcaggctgtatggttatcaatacagcgaaatcatccgttcgcttatgagcgtttatttttgtggcggctcatgcatcgaggatgtcaccactcatctgatgtaccacctttcgcttcatccgacacttcgcacatgcagtgccgacacgattcttagagccataaaggaactgacccaggataacatttcctacacatccgacactggcaagacctacgacttcaacacggcagacaagctgaatacactgctcctcaattgcctattgtccacagggcagctgaaagagggcgaggggtatgacgttgacttcgaccaccagttcatagaggctgagaagtttgatgcgaagcctacatacaagaagttccttggttatcgccctggcgtggcggttattggcaacttgattgtcggcattgagaacagcgacggcaacacaaatgtccgtttccaccagaaggacacgctgaagaggttctttgaaaggtttgaacaaaacaagcttattatcaaccgtttcagagctgattgcggctcgtgttctgaagagatagtggaagagattgctaaacactgcaagaccttctatatccgtgctaaccgatgcagttcgctctacaatgacatctttgccctcagaggttggaagaaagtggaattgggcggcattgagtttgagctggcctccattctcatcgagaaatggaaagggaaggcataccgtcttgtgattcaaagacagaagcggatagacggcgaactcgacctgtgggaaggagaatacacctaccgctgcatccttacaaatgactacgagtcttccgagaaagagattgtcgaattctataacctccgtggagggaaggaacgcatcttcgatgatatgaataacggattcggctggaacaggcttccaaaatcctttatgggagaaaacacggtgtttcttctgcttatggcactcatacgcaacttctataaattcatcatggcgaggcttgacgtgaagaggttcggactcaaagcaacaagccgcatcaagacgtttgtctttaagttcatctctgtgccagccaaatgggtcaggacatcaaggaagtatgtgctgaatatctattcatgcaacaatgcttatgccaatgtgttccagaatgactttggataacaccgacaacttatagtcgtgattttgcgtattgcctcaagtcgcatggtggggtaaggggcatttatatgtctttatggtgacattcgatgcactgtgccccctttttactaacgatgcagattcttttcgcttctgtatcatattaggcgcgtagttgcggatttgaggattatttatttcaagtctgtaatcaatgagaagtcttgatcaccataatccaaattctctccacccataccccaaataaaggtgtaattgtgtgttgccgccgcactatgaatagaccattcgggagacaaaactgcctgatcgcctttcatccatatatgacgtgtttcatccacttctcccataaaatgacaaacagcgtgttcatcaggcacttcaaaataaaaataagcttccatacgacggctgtgcacgtgtgccggcatggtattccacacacttcccggtttcagttcggtcatccccatctgcaactggcaggtaggcaatacctgacttaccagcatcttgttgatgcaacgatgattggaaccttccagtgaacccatttcagcaacgatggcatctgccttggtcacttttttatcgggatagttacgatgagcggtaacagagttaaaatagaatttggcaggatttccggcatctttactttcaaaagtcacttcccggtctcccgaacccagataaagcgcttctttataatccagttcgaacacggcatttccagctttgaccacaccgggaccgcccacattaaaaatacccatttcacgtcgggaaagaaagtaagatgctttcagcggatcaatggtctccagttttaatatctctcccaccggtttggctcctcctacaaccatgcggtcatacatggagtaaaccatgttcacctcattgtccgaaaatactttttctattaagaaatcccgtcgtatcctttgagtgccatagcttttggcatcttcgggatgcgcggcataacggatttcataatttgtcttcataagcagctattttatgtttttatagtattccgaattatttcgacttgggcaaagttacgaaacaatcttgtttcgatgctgcaaaaatcgttcagaataggtataaattttgtcctattatatgcaaaatctgctacttaatacgtttcagaacactcaaaaactcaaaatcaacgagataaaatatcacaaaacttatcttgaaacgcacgcgcccggcttaatttcagtacgttttggttaatgataacaaaggccaattgatgtccattagcagcttttacataccctgccagtgaactgaccccggttacagaaccggtttttgcatgcacatttccccgagccttggtctgtttcatccgattttgtaaagtaccgtccactcctgctatgggcagagactcatagaaaggaagaaaaacttcccgatgataataggcatacttcaaatactccaatagtaaacgtggagagatataattataaacggaaacaccgctaccgtccgctatcttatagttctccggattaaaccctaaagctgttttcataaaggcgtgaatggcatcggttccatcttctcctgtcacccgtttatgcagggaacgcttggcagccaaatgataaaacattgattcggcacacaggttatcacttttcttcaaagctctttccaacacttccttgagtggtcttcggacggtataaagcgtaactatactgtcggccgttacaggacaatcggcatacgtgcaggttcgcgcttcaattcctttgctgcgcaaacggctgacaaaggtatgaaaaaagaaatctttggaagtatatacattcaatttctcagtatagggataagaaacattcccggaaacggtaatgatattgccattgctgagccagttacgagtgattttcagctttccggcttgcggattacggctcaccccgtgattatgaacctgataataatcggaaaccggcgtacaaactactttgggcaacgagtctttctgagcaggagaaaccgatacatccacgcagcccctattcagcatgagaggggaaagatagggctggaaggaataaggagtatcgtcccaacaccaaccggaaccccaataaaccgagtctgtcatggaaacatccgctgcaagggtatctgtcacataacggatgcctttacttaccaatgcatctaccagacggtccagatcctcgtccataaattccggatcaaaaccgcctatcagatacaagctgcctttcaacgtgtcattttctatttttccacgataacgaagactggtatccatggtataatctgctcccagttgtaccaaggcggtaaccgaagtgattattttctcaacagaagcaggccggtacagtttatcatcttggtaacggtaaacggattctccggcggtcaaatcaaatacggcaatacccacttcggatgttttcagaacttcttcatgcagtaaagcgtccagccgctgagatagcggctgggcgtttatgaagtgaatagataaaatcagtaaaaagaaaaataaaactcgtttcattatagttccctgaatatctcacccacagtaggatgaggaaatacatatcgtttccaatcctctatggtcttaccatcctcaatagccatacctgccaatacaatcagctcggaagcaggattacccaacatgtgcgctcccaatacagtaccgtcttcggctgtcaaaactttgcagacgccgttcactccttcattctcggctacaaaacgcccggagtaagccatcggcaacttaacggctcgataaggaatacctgcggcctgcaaagcttcctcgctcatacctaccccggcaatctcgggatttgtatagaccacacccggtatggcacgataactcatcgcatcttccttacctgtaatatgatggacagccacttccgcttcacgcacggcggtatgtgccaacaaagagactccgttcaaatcaccgcatacatagacaccgggaacagaagattgcaaatgttcatctactttgatgcatctgcgctccgtccattccaaattcagattttccaatccgaaaccttttgtcaccggacgacggcccacactcatcaataacttatcagctgtaacagttcctgttccatctgcattttcgtatgacacagtaataccggtttcctctttggacacccctactactttcgtactgagcaggaacttgattccttttttggcatattcagcccggagcatagccgacagctctttatccatgccacccaggatctcatccaacatttcgacaactgtcacctgtactcccaaactggtaaagaaagaagcaaattccataccgatcactccaccgccgacaatagtcaatgaagcaggtacttctttattatccagtgcatcacggtgcgtccagtaatccacattttccactgccggaataggaggaataaatgtttcactgccggtacacagcagcaaattctcacattcataggtttccccaccacattggatggtattcttatctacaattacagcttctcccgttactatatttacctgatgcgcagtcagttttgccttgatacccagtaccagtttacgaaccacctttgatttacgcgccacaatttttcctaaatcaaaagaagcttcaggcacattcacggcatactttgaagcatgtttcgcataatcatatactttagccgaataaagcaaggttttggtaggaatacatccctcattcaggcatacaccgcccaaacttcttttttcgaacaatacaacactcagtcctgcctttccggcagcttcggcagcagtataccctgcgggacctccaccgatgattgcaatttgatatttcatggtatttattttgggttaattagtttttatctgttcaaagccttcaacagacagatttggatctacttctctcaatgcttctacaaattccaaaggcttatcagggttaatcattacaaaaccttgggcatgctctattttcaccttttgcattcctattgcattcggattataagacactttacggattccgtctacacatattctgttcccccatcccggtttgatttccagaacaccattgtcttttacaatataaatagttttcgaccgcgaataaaacattaacacaggaataataattcccccaagcgccgaaaaagcccaatttttctccaaatacacattcagaaaaataatcagaacaaccagaccgactataatgatccaccagttacgggttctttttgttttaaatactttctccataatttattcctcctctatcctatgctccaaccgcttcaccaacgcattgataaattcttccggctttacaggaaccaatgacaataaatttttcttcccataatgtatcaatacatatttcgaaggcataattccaccaaatccggaacttcgtttcagctccacatccgtaatgtcaatcaagggaatggtcttccctttataaaaacgaccataatacaccactaactttccatccgcagtcagcgtataagtagaatggataatacgttcaataataatgatcagacccaatgctactaccaatcctatcattgccttcatacaccaaaaagcaaataccatgacggctgtcagcagtatcaggagaaaataagtacctcctgctatcttcacatgaaaaattcgattcatcatcttattgtaatttgcccgaaagataataaatttatcgtttatcgacctcattacggcgcagaatgagagaatttatcctttttttgtcctctttactgtacgtttcatcttcaaagcatacaaatttaattcgatagaagattccgtttctgttatatcaccctcatcagtcagcagttcattcagcagttctccactacgttgtactagactcttcctcttttcctcatcatactcggtagccatgatatttacattccgtactaatgtccttaacttaaagaatgattcgataatggcaaaagtagttgcggtagctctcggacttcttaaaattgtagccagcatataaagccctttttcggtaaatgctttaggttctacgggagaatgtttcaaactactgaaccggtcgaaattttcgaccagttgctgtttttcagatacttgcaacgaaaacatataaccatttgggaatttgtcccgattgttttttactgcttcattaattcgtttggtttctacgccataaagcttagctacatcccggtctatcagtactttctcacccctcaactcaattataagttcttttactcactttcgtgaatgatttctttattgttttccatcctattctatttaaaaatgcagaaagttacacgtttaatttcatacttgcattatctatttcgtttattcttcacgaaaaaaatagtaaaaacaagagtaaaaggtacaatgaataaaggtttttcgtagctttgcacccataaagcatattatcatggttaaaaaattcgatttccttgttatcggctcaggacttgccggaatgagcttcgcactgaaagtagctcacaaaggtaaagtcgccctgatttgtaaagcaggactggaagaagccaatacctattttgcccagggaggtatagcatctgttaccaacttgaaagtagacaatttcgagaaacacattgaagacacgatgattgccggcgattggatcagtgaccgcgcggctgtagaaaaagtagtgcgagaagcacctgcacaaatccaggaactgataaaatggggagtggattttgataaaaaagaggatggagaattcgacctccacaaagaaggaggccattccgagttccgcatcctgcaccacaaagacaatacaggagctgaaatacaaaccagcctgatagaagcggtaaaagcccatcccaatattaccatatttacagatcactatgcggtagaaatcattacccagcatcatttgggaattatcgtcacccgccatacgccgggcatcaaatgtttcggtgcttacgtattgaatgagaaaacaggagaagtggatacgttcctgtccaaagtaactgtaatggcaacaggcggatgcgaagcggtataccgcaatacaaccaatccactggtagctacgggagacggcattgctatggtgtaccgtgccaaaggagcagtaaaggacatggaatttatacaattccatcccaccgcccttttccatccgggagaccgtcccagtttcctcatcaccgaagccatgcgcggttacggtgctgtcttaaagaatcaaagtggcgaagaattcatgcaaaaatatgatccacgcctgtcattggccccacgtgatatcgtagcacgtgccattgataacgaaatgaagcagcgcggtgaagatcatgtatatctggatgtaactcataaggatccggaagaaacaaaaaaacatttccccaatatttataaaaaatgcctcagcctgggtattgatattactaaggactatattcctgtggctccggctgctcattatctgtgcggaggtatcaaagtcgatctagacggacagagcagtatcaaccgtttgtatgccatcggcgaatgttcatgtaccggtctgcacggaggtaaccgtctggcttccaattcgctgatagaagctgtggtctatgcggacgcggcagccaaacatgcactaaatgtactcgaccgatatgactttaatgaggatatccccgaatggaacgatgaaggaaccatgaacaatgaagaacgggtactgataacccaaagcatgaaagaggtgaaccaaattatggaagcttatgtaggtattgtacgcagtaatacgcgattaatccgtgcttggaaccgattggatattttatatgaagaaaccgagcgtcttttcaaacgctgtaaggcttcacgcgagctttgcgaactgcgtaacatgattaacatcgggtatttgatcacccgtcaggcaatggaacggaaagagagtcgcggactgcattatacgattgactatccacatgccgctgaagaaaaaaagtaaaaaatatttttttacttcaaatagaactgattatttttataactcccgttagcagaattactttttcttgttgaccattattgcactacgaaaattaaatcaattctgctaacgagattatttttgtcccattcgtataaacatgaactaaaaacagcaggaacaatgacggaatcatctatccgtaataattatttttcctcaagcggattaatattcagaatgattctcttataagattttagattgggaattccattatctgtaagttcaagtatcaaatgtaactgtttgcccggattatccggtacaattatctccgccctcttctcatcggcgtgctttatagccacctttgtttgcacactgcctgcttcccgatattgccaccattggtaagacaatgaatttttatcagggtcaaatgaagaagaggcatccagtattattttttctcccggccggactgtgcgtacactttctcccaatatccgggcaacaggttgatgatttgcctttgaatattcatcagccacgcaccagtcggcacgagccgcccagtcattttgtatagcaggcaaccaacgctggaaagtataatgcgaatccggcacaccgtttttcaaatcattcccatcttgcatgtgattgccatttttatactccgggcgtcctccccatcctcctaatgtatagtctgtatgctgttcaagtccattacgtataagaggcataaaagaaggagtatccccctcactggtatattcctgaggataggcggcacaaagtggtccgtgcccattcttaatatggtcaaccaaccaaggtttatccatgatctgttgcaactcttttgaatttttactaagtctgttcttaaaataataatccacactcatgtaatcccatacatatctccatcctccatcatgatccggcgcgcccgattcataaataatgatttcaggaagattctgttctatccattttccaccgccgtcctgataccaaatacaatataatctggcttttgataccgcttttgcccattctgcagcagaatatttctgcttgatctgccataaggcattggcctgggtgttggctccaccccatgctaaaatatgaacaggcctcggatcagaatcaagcaatgtccttatgatgagctgtgccccctcgctatcagacagtaaaggaggcaatttatgcaagtcctctctgttctcattaccaaccgccaagacacttagcagatattcagcatcgggataatcgggattatgtttcctcaaattaggcagacattccgcatatttggcaatttgtgattcgatccatttatctttactatgtccgtctttctgtaccccattgacttgaacaatgcctgcgacatcataatcagaagaatacataagaaaacgaatcatagaactttgatcgtcaatctcaccatccgtagtgacaataacccggggcttctcctgctgtcgggcaacaacagataacattgacacaaacaaaaaaacaatacagcataaaacaggggtcattttcatattacaaactgttaaattagtaggccaacacattccaaagatctctgatacgttgttcggggtcccatttgccattgaatgtccacttggcggtaacgccataaaactccggagcattctccgcctccttcaaattatcgtttaaccagccactatgccctccttcacgggtacaaccataataataggtacgtagcccccacggacagggatcaagcactttatccgaataagcataatgaatattcccgtcaagcacattcttcgacattttacatttgatgagataaaattgggaatcatgatgatagcgtcctaaaagtgtcggtgtcttagcatcaaatgaagaattggtaataaccagtttcttgttcttgtcacctcgtccgtcatgccaaatcatggcacggctatcaccataaaaatggcagcgtgtggcatagcaccatccgcgaggacaaagaaaatccacacccggacaacgaagatagagatcggcatgataatacataccattgcttccgggcgcccacaaggaaagggcatcgtttccatcggcccatacattactgttgatgatgatggtacgagtggcacgtccaaaaatcgccatctgatggatggtcgtattttcaacggcagttccgtaattgttgtaaacagtcagtccgctaataacacaatcatccgcaccttcctgcaacacaatgacaccattgcctaccggacgtccatgatattccgtgatggcacgtgtctgggctgtttcagccaagacaatccgcgtactgtcacggttttcccccaccaaaacaatattaggcctgtcaataatcactttttgatgatacgttccgttcagcaataagattttaaaaggttctgtcggaatttccggagccttttcaatagctgcctgaatactctctcccggctttaccaccacatcaaaagccgtacgctctgccatgggacgacgatacatttcaataagcccgttttcattcgctcctttggttgccagactgattgccaccttatgcttcggatcatatttgtccgcccatgcattgtatatggcaaaaagctcagccggtctgctattgtaccaactatatccgttacgacgttctgttcctatttcttccaaatggcgacgtggcagcccatcacggtcacatacatacggttcacaatatttcaaatcataataacgcgcccaaataggcttggcttgaggatcttccacaagacgagtatcccgctcaccatttgccagcacgatacgctcgcatttcaaaccggtaagtttatacctgtcaaaccatttcatggctccgtgaaccgcccgcttcacgcgtgcgtcgggtgcaggtaattccatgagcagacgcacaattccggcactctccgccgaacaataagacggcaactcatacgcacgtgccggtgcaggcttcaatgtttccctatcattctgctgacaccacactgaaggttctccatcctttataatttgtgtagccagtatacactctattcctttattaaaggcttttcccaaacgtacacacaaagccttgtctatcaaatcatcctcataaggcgctttgtgattcatcatatcacgtatcatattcaatgtattgactatggcatcgtcattgaaagtaatatgtacctgataaccacgcggaccgggccaaaattgcggccatcctccgttttcgtattgaccactcagcaaatattccactccctgaaggaaagcatcccgataacgtatatccttagtctgcctataaagacgggctaaaaaaatcatctgggcagttgtggcattattatctatcgtagaatcatcacgacgtgatttatcctttatcactttagccagctctttatcattcatgcggcgggccatatctatattcttcggccaaccgcccgtacagcgttgaaaagccaatacattttcagcaatccgccgagcttcatctgtcagaaagaaagaatcctgctccatacgtgctatttgtttccattccttaggatacgactcattatcctttttatgagctctttgctgcgcaaaggagccggttaccatggcaaaagccataaagccaataaacacttttttgaatgtatttttcattattcctatatgttttgataaaaaccagcaaacaaaattatgcgttttccaatctgaatacagagaatatttggtctttttcaggcagattttgcacagacatcatcaaacctatacaatttttgatactctgcccctttacctatacataaaaaagcctatctatcacagatcggcttttctatcaaatatttgtctttcaaaatccaaagattctcagaagacattcacattataataactataaaacttatcaaaccccattctactatctaacagaaccattacgccatttagccacaccaatgttcaactgataaatttttgactccataactttacctgtctgattgtaatacaagtttacaccatgctctccagccgtaccatcaagtgcatctgcacgatgcatatattgatcgttatcagcagtagccttatgtggtggatttggacttaccatcagttctaatggagaaatatcatctacaagaacttccaatgttccatttaaagtagcagaaccattgttgaccaaggtgccaaaattatttttagtcgcagtccatggattattgctaaaaatttgtccgttggataaaaaagtatttgtagaataattattgtcaaaattcaatgtcacatgtccggctgtaccgtctgccatagtcattgtcttacggatatcagctcctgccatagtcatctttcggacatcaccgtcctgcttggtcaaaacaatcaggttatttttcaccgtataagtacttccatctggaatattacgcatattgaaaatatttcctgctgcacgagtgttccagttaaccaaagtattgttttcaaacgttatattccatgcccctcccttccatgcactctgcttggtttcactgaaaaatgaagggaacggacaatcatagaaagtgtttccacgaaccacaaagtccttatataaattagaattcgcattattcccggaaccggcaatccatggataacctccggcaccattactataatagccacagtcaaagaactggttatcctctatcaagacatgatcccaaattttgtaattaggcccctgctcacgaatgaacccacgtaccagacgcttgaaagtacaatttttcaccacaaaactttccaaatgtacagccataccattagaaaacatattaatgaaataattacctgtagccgaacccaaaccggcaacattatcaccataagtaagagccattggacaatcgaaatcaatatcataaaattcgagcatcttcatataaatttctcctccttctccagcttgtggctggcgcccgaacatcaaattcatagaattaacattagtacctgtcatatgcataccacctaacaatactttagcacgtttacctgctgctacatcctcaggacgagtacgaagaacaaaacctttgcaggtagttaaattatcaaacatacaataagtctttccaccttccaaataataagtctgtccttcggctaaatttacatcggaaatgaagtctgttaaaaggaaatcaatacgcattgcattgtatttcagagcagcctcgtgctgtatcaaagcattttgataagcttcatctgaatcaaaccggtcacgacttggagcacttaagtcatgagttactaaaataggctctcccggttctccgtctgagcgggcagaacaagtattgtaatatgcatcccattttaccttcacattctcgttgcgaacattaatcacataaacagagtttttctgaagtccgtcaatatctacatatcccttttcaaaatcctcatcggttaatttatattttctccatttttcattcactgttgattcaggattattaggagacggatctacttccaaccactgataaacaaaattatcgttagcatcaagctgaaatttttcacgataaatagccttatcatcgtctgataccccttctgttacagttttgaaagcacgattcaacatcacacgcatagtagtctgtgtagtcttagaagcatctacatagacacagaatggagttgcatatcgatcagaagtggtaatgcccatccattctgcccactgtctgccatcaccatgtccataccatttggatgcatgtgaaaaatcagtcacattatcatcttttgttgataacacgcgaatagcaaaacgataatcagtggaatactgttgatctttaataactaaatcaaggacctccggtcctacaatggtatctagtaacaaaagaccgttttcggcagatgtaccccaagcatctgcaccacccgaaacatttggctgtagtgcctgacgaatctggtagcccgcacagttattcactccataccaataaagatgaatatcattgccattcggtccctctgctttacaattataagcatagtcatccccttttcctctattattatcacaaatgaacatagtcatccattctctatctatatttgccattcctttctcatcatcagaacacgaaatacatgagaaacctgaaaataacattaatgcatataaaaatatttttttcatcattctgtccttttataaattatttatagccataatagttcttgtatacacctgctgagcgttggatagccgcattaggataaggtaaaatataacgtacaggaggtaaatcattcacctcaggaacagaattaccatccagtggtgattctgttccatctttgaccaacacaatcattccttgttctgtatgacgaatatatccatagaatgaatatttacattggttagtaggctccgaatcattactccactgataaaattccgccatcttccaagttgctccatcaacagctaccaaagctgtcgctggttgattagctgatttgtaaggattataaatatagagcatatccaatatcttattgggataaggatagccataaacttgatttacatccacacgccattcaaccgtttgtggaagaacatggtaatacatagattcgggaagatcatccaaataagcactaccatcatgttcagctatatcatcttcgaagccagtagaagaaccggcattagacattcctacagaaagatagcgcaaaaaactataaacaatttcctgtccataaagattattacggacaagatctctccagcgcatattctcacccgcaaactcccatttacgttcatcaagcacggctttcaaaaaagtttctttagaagaagccacctgagcaatataggcagaaacaacactttggtcatcgaatgcccgtgcatggacttgacgaagtgactcctgagcagtggcagtaggtccttccaactcattaacagcttcggcattcatcaacaaaacatccgtataacgcatataagggaagttaatacctgtattactggcactcaaattggtaaactgtcccgcattcgcccacaatttagaccatttattattatggacagtataatccgcacgaatcatacaagaatcctgagtagcattattagcactgttaccataataccaaagtccattaataaaatctcgacgcttatcattctcatcgaatgaataacggtaaaaagcactcaaacgtatatcacctttagattctccccatacattcttacccaatgtctttccttcattaacggttgatgtaggtccttgagaataccctgtattacctgtagactccttagcaaaaggaatctcaaaaataggatcacctttagcaataatttcaaaattgctttccttggtaaaaatatcttgataagaagtgcctacagagtgtgtccccgaagcaataaccaggctagtatattcttttacgatttgataatacttctgataatcttccggacgtttcatcacaccataactatttgcattatttttatccggatgaagtgaataacctccggcagtcaatgcaatacgtgcaattaatgcccaagcaaactccttagacgcacgttctactgttgttgttgtagtagaagacatcttaggagcaatatcctgcaaatcttcaataagtttattttggatttcttcgcgattcattacaggaatcacataattatcacctaattgtgaggctggcaggaaagtgaaaggaacatccccgaacatcactaccagatcatgataaaccatagcacgaagacacttggcttcgcccaacatctgcataacagcggtattctcttcattataaagcggaccagtttctacaccccggataaaacggttagcatcttcaatagctttataagaagctctccaatatttatcaatttcgccaccttgatcgtcacaatcaaaacgtgcatagctattatgggttgctacattacctgtatacatctgcatatcaacatcactgttcaaattaaaagttttctgataggcactgccataaagatcacctaccaagatagaagcataaacaccgttcaacgcacggctaatttctgtttcttggctgaacacaaagtcctcattgtaacttgatggagaatccacgtcaaggaaatcattgcatgatattagagtcaaagttgctaatcctattattaaagtatttttaaatttcatgtgctttcaaatttagaatgtaatattagtacctagtacaaaactgcgactacgtgggtaacggttatagtccataccacaagttaatcctgtctgaatatccacttcaggatcataacccgaatacccagtaataataaacaaattagaggctgatacataaaaacgagctttcgaaatcccccatttagaagtcagatttccaggtaacgtatagccaacagtcaaatcctgacaacgcagaaacgatccatcctcgataaaataggaatgagttattttttttgtcacatccgtcggattccaaagtgtcctaccttcgtttaattcacggtacatatccaacgaaccatcaatatagtaacatttgtacaagcattcgccatcaccatcacgggtataacgccaacctttgtcagcaaatgtggaaagcacattgtagaacttattcttattgctttcggatgaggaaagctggtaagctgtcgcattattcacatcaaaatcaagcataaagttgaagttcatggcaaaatcaaaacccttccattgtccgctcaatccaaaacctccctgcacttttggattggtattacctataacagtacggtcatcttctgtgatatatccgtcaccattcaaatccttgaacttgactttgcccggcagagtagctatgcctgaattagaatctcctgaaatctgattgattattgtttttggatgttccacaccgtctgcatccataataggtgcatctttcgaagttccgttttcagcggccgttgatccccaaggtactgcttgcaagttattagtgggatcaaaatagaattcatccattgaatataaaccatcatatacaaaaccataaataagtcctacttggtcacccaccttcaaacaataatcattgtaacttgatttccaacggttattctgatcccaaatcacattgtctgtaccatttaatttatcaactttcattttattcatacctaaagaaagatttgcggaaagcacataatccctgccactgagaatatctcctgatatagttaattcaacccctttattagttacttgtccaatattttgcatctgacttacataaccagttgctgaaggaatgtccgatttataaagtaaatctttcgtcgtattccaataaatctccggagtaacagtgagacgaccattaaaaagcgtgatatcagcagcaagattacgagttaatgtagtttcccatttaatatttttattggcaaaagtagtacccccttgattaccataccattgctctccaaactgagttgcttctccaaatccaggtccgccggtagaattaacagtatataaataacgccacatatcatcactgatacgattatttcctgccaaccctatagctgcacgaagttttaactgatcaatccattttatatcttccataaacttttcttgtgaaagcacccaagcacctgatactgaagggaaatatccccattgattacctggagcaaatttagtggaaccatcagcacgcatagttacagagagtaagtatttgtggttatagttataacttgcctgcccaaagaaagaagcagtgcgatctggagtcgaaagtgatgaagttgactcctgcggtgtaccgaatcccatattatcccaagcctgtccagcctcaaatgcacgtgggaaataacgattcttttggaagttcttcttattttggctatgataaatttcttgccccaataacatggaaaaattatgcttatctttaatagaaaagccataagatgccgtattagtccaaatatatttaaaagactgatctttctgaatacttgctacaggcaacgaattattttttgtaccttcacctgtcaaggcaccccaaaaacgatattgatctttccagtttaaactaagagtggcttctgtacgaagcaccaatcctttaacaggcttccattccaatgaaatagcattagtatagttataagcatacttattctgttgattaatggcaatatcacttttcggattagtataagtaaacaatgcttcttcatcagggtcagcataagaaggatctatatatccgaattcacgtaatccgttagtgggtctataacggagtacatcaataataccgcctgtaccaatattatcacctccagctccttgatcacggcgaaacgtaaatttaggattgatatgcaatgtcaaatttttagttatatcaatagctgtcttgatattcaaattggtacggcgcacacccgaccccataataatacctttatcttcgctttgagtaagagaagcagtgaagcgcatcttatctgtacctccaccaatagttacattagtagaataattgataggattctctcccattacctcatcctgccagtcatgagtaggcaaagaataatacatatccaaatcttgcggattgccaaaattagcacggaaaaatttggcattgctagaacggctaccattacacgccgaccattcatattgataacgtgcaaactctgctgaattcattaaatctaattttttagacaaatgactagtagacaaatgggcattgaaacttacctgtatttttccagctttggccgatttagtagtaacaaccactacaccattaccgcccttagctccatagattgccgtgatagaagcatctttcaatacatcaatagaagcaatgtctgtaggaggaatatcattgatgttatccacctgaaaaccatcgacaatgtaaagaggatcattgctctgggtcacagacgtacctccacgaacacgaatgttaatatctgcccctggagcaccatcgaccgtagttacttgcacaccagctatttttccctgcaaagccacagcggctgaagtaactggtacagcagcaatcttcacaccagacacggaacctactgagccagtcagatctttacgagccctgctactgtaacccagcactactacctcttcaagcgcttgtgaatcatcttgcagcgtaattgtcagttcttttccggtaaccgcatccacttcttgcgtttcgtaacctacaaaagaaataacaattctttttcctttagacacggccaaagtaaactttccgtcaaaatcagttatggttccgttggaaggatttcccttctccacaacggaagctccaataacggcttcacctgccgaatcaagtacagtaccttttacggtaatgctctgagcaaacatcatcaccggtatcagtaacagcactgaaaacaaaagaagtctgcttttcactcctcttaattcatttgtaaatttcataataaaatattaagttaaacaaaaatttaaagtccattttttccgtgaatgtgaaataatataaatcactattattatttatattctattctaaaaggaaacaattacaatttttatgagaataatagatacttattaaaatagcacacgcattcttataatttccgtgtacgcacacaaaacgagtgaaaaatattagatatacaaattcccatgctaaataaagcacatcatcaaatacattaacagtaatgttttccattataatttaatgttagtattagaaaattggtttatttttatactatatacgccacaaataaaaataatattgttgactgaacctaatttttgtattgaaaaaaaattaggtcaaccaataattacaacataatgaacaaaaaagacacattcatcaatgaaaacacggaattacataaaaaagcagtgctatggacttgtcctccataacactgccacctatatttattataactgacaaactcctacagctacaaacctcactcctcctattttatctcatcccacttcggtggattcacctgcatcaaatgacggacaaagaaatcataccgcttatgttcgccaaaatcttcccccattgtatgatgcgctccgggaatcacgaccaattcaaaatctttattcgccttaatcaatgcattgaccacctgcatggtagaggcaggatctacattatcatccagttctcccaccactaacatcaaaggacgactcaacagatgtgcattttccacattagacccttccttatattgatctcctaccggatagcccagccaaagttcattccaccaaatcttatccatacggttatcatgacaaccacaagccgaataagccgctttatagaaatcaggataaagcaaaactgcatttgtagattcctgaccaccggcagaacaaccgtaaatacctaccctgtccacatccatataaggatatttccgtgcagccgccttaatccaagcaatatggtccggcaggccggcatctttcaaattcttataacatacattctcaaaagcacgcgaacggaaagaagttcccattccatcgaccattacgacgataaaaccaagttcggccaaggaagtcatattccagtcataaggacggaaagtcttcggaacatactggtctccgggaccctgataaatgtattcgataaccggatatttcttgttcgggtcaaagttggtggggcgggcaatcaatccccacatatccgtcttgccgtcccgccctttggcaacaaacacctccggagctttccagccttcggcctccaaaagagttatatcggctgtttccaacggcatcaccactttgccatccctggcactacgtaacacagcgacgggaaccttgtccaccatagaataaacatctaccaaatacttcatatctcccgaaaaccaggcacggtgcatcccttcttcgggagtaagacaggtaagacctttgccatcaaaaccaatgcggtaataacggatgagataggggtcctcaccggcttccataccatttgccgagaaatagatctgacggttatcctcatctacccgaagcacttcgcgtacataccattctcctttagtaatttgataatcgggctgtgcggtaatacggttgtacatataaagatgattccaattgtcacgctcactcatccatatcatctgcttgccgtcttttaagtcatgacggaaatgacgggtataattcacatatttatcgctggtttcttctaccaacggacgcacttttcccgtttcggcagaaagttcaagcactctgtacacctgatgtccgcgctggttatattcaaaagtcacggcacggctgtcgggattccattcgggaccatatacttcatattgtcggtcgaacaattcagtagaaggaataatgcttcgtccgctttccacttcatagatgcagggcactttaaaaggaagttcgtctcccggcttcgcatactcctgtttgtgaagcttgggctgaagctgatcagccggagaagattccacataataaacatagcgcttttccaccggacggatcttgcaggaagccaccttcttactgtccggtgaccagcggatgtaggctgaataataattacccagtgtcccgtccaagctcagttgcttttcttttccggtagccacctcctttacatagatattctgatttttaataaatgctatccatttaccatcaggagacggaaccggcgatgctgtcttctcatcatccacctccatccaatgcttttgcttgggagggagaggaagcgccccttcattgaccagctgatttttccgggatgcatacatccaacgttgattattaaacacaaagtgtagcgtatccaatcccttactgaccgacaaatgccccaatgcaagagcttccggcttgacctcttttccggatgcagcacccagcgcctttgccagacgatgagaatcaaacaattcttttctagcttttttatctgcatctacagatacatacaggtgtccgtccggagtattccgcacataccaaaactgatgagtaccctctatccattgcggattgacattggaatagaaaactttatccgcactgaacttctctttcaatgcataagcacgccgataatcatcagccgtaccttgagcgatagccatgcccccactaaggaacatggctaccagccaacctaacttaccaaccttcattttgaattattctatttcacttcccattcaaacaaacccgatgaattatcggccggctgaacaatctccagttttaccgcttttgtctttaccggattaaaattaactgtattccccgtacctttttccactccatacttatccgctccactcaccggttgccactggccttgtgcatctttatagtacaccttccaactttgcggtatgcggcatcctccccaaggagcatcatcataccaatatacggtagcactggaaacagtcgcttcagacggaaactcgtaggatatccattcggtagttccctgtttgggccaccaatggtaatagggtacggaacggtcattctcatctttcggtaccagacggtcattaatggcggagatggatttcaccttatgcgaagcatccactttgctttccgatgccagcgtagcaggcatagtcggacgagaagcacttaattcctgaggcaaccatacagccatagcgcctgctccccggtgtgcccatgcatagtaaggaatcaaagtcaattttacgtcagtagcggtcagacgacctctatcgtcataacccagaatctgtgcatctgttttcaattggttaataccatacagcaaatccggcttttcaacgacctcaaattccggagtacgattcataaatacactcagcacatcaaaatcattatccggccattccgcacaatagactatcggtccacgttccacagcaatacgtccacgatctgcttccaccttattattggcttttactgtgcgaggctccatatcgaaatgaacggctaccttatctcctttcttccaacggcggtctatgcagaaataaccatctttaagctcactctgcaccggttccccatttactttcactgtatagctcaaacgctttccatccgaataagtgtacaggtcactgggaaccacctgattacgtacccatcccgggatacggattttcattgtaaactgtccggcattgttcttgttgactccgatagtaacttctccgttccaaggataatgagtagtctgttctaaagaaacagccttaccctctaccttcaaattcgaagtattggacatgaacagattgacatacacgtccttatctttcaccgcatacacatatcctggcaaagaaggaatgaaacggcagatattggacggacaacaggcacagccgaaccaaggctgacgctggtgctgtccaatgctttccaacggattaggatagaagaacccgccaccgtccagggacacgcccgaaataagaccattatataaagtacgttccagcacatcataatattttgcctcaccatgaagcaggaacaagcggtagttgacatacacattaccgatagccgcgcaagtctcacaataagctgacatattgggcaattcatagttcttgccaaaagcttccccgttactggtggcgccgatgccaccggtgatataatatttcttgcccacaatgttgtcccaaatacggtctatggcatggatataagccgtgtctcccgtcagtgcggctacatctgccatacctgcatacatataggcagcgcgaacagcatgtcccacagcctcatcttgttccactaccggtttatgcgcctgactgtattcatccgtacgggtagtatatccgcgctggtccaaaaagaatttggcttgatccaaatatttctgttgccctgttaccaagtacagtttggcaagggccatttcggcaatctgatgtcccggcacacggatttgctgtccttcgcctgtacctatctcccggcatacacagtcagcataacggatagcgatatcaaggaaattacgttttccggtagcctggtaatgcgcaatagcaccttctaccatgtgtcccaaattataaaactcatgactcagttcctctaccttctcccaccgtttgcttcctgcccactcatgcggatgcttcggattcatggtacgcgaagtatagagataaccatccggctcctgtgccgcagcgacaataaccagcacactatcaatatacttagccagttttttatccggataggtctgtaacagataactggcaccttctatcgttttgtacacatcggtatcatcaaaagccagaccgcctactttaatggtatcactgggatgggcagcattgacaaagttagtataacgtcctgtttcctcacatttactgaacgccagaggaatcgttacttcacggctggcattcagtcgttgcccccagaatgaatcggttactttcaccgaagtgaaaggtacggggtcgataggatagccgtgcgactgatttcttatttgcgctgttccgcctgctacggtagcagtcaacagagcagtgactaaaagtttcttcatggttctatcatttaattgtttatcatagtttttgcaaaaatacatattccggtcataggaaaagggtgaatcactctttcaacggcaaatattcatcccataatttcaatgagtgcagataaccggtaaagggccagtctccttcggcattgcgtcccaatgtgatgaattgtgacggtttcaccagtaactggatatctttctcactgactaattttccattgatataaacctgttccatccgcccatcaaagcagatatagatgtgctgccactttcctgccaattccttcatgtccttatatcctgcatcttcataccagccatagtgattgattactccacaacgaggttccgtgccgttaaccaacatgattttctccaattcatcatgcgaggtagtaaaatcggccacgcattcattttcactaatggaatcattcagtacccacgcctccaaggtataaggagcattatcctgcaaagtggcaggaagcataaaactggaagtatagacctgagtaccctcaaaatgaaatgcctttttccctttcacttctttcacaacaaggggtaatttccgggtttcaaaatacccttttactcctcggttttccaaataaggaaccgtatcgtttacggtaaaatcatcagcagaaagactgaccaccaacccatgtttctgctgatcggctacaggcagacgcacgatatccgtttccgcatcgtatgccttttccgctgcttcctgtttccaattatagtaacggaaattggtaatgaccaaaggttcggtggaactatgcagcgtaatcgctcctgatgaaagacacgactccgcttcataactctgccatttacctgacctgtaaaccaacccactaactgtatgctctttggacgaggagagtaacggatgactatactccaatgtagttcccggttccagtaccaacgcatcacgcccatccatgcgcaatgtgcgtgccgaaccttccttcaaagtaaaagcccctcccagcatcccttcattgttctgccattcacgaccattccaatcggcagcggtaagtcccagccattgttgcggagccgatgcttccaccccatcaaagattttcaaattccagaccgccccgccaaatccgttcttctgtcctccggtaaaggtaaggcggacataacgagccttcaccttgccaaaatcaaccatcgggctgcctgccagacgattattccgcttatcagcaaaaacagaccaatgcttgccatcgacagaagtttcaattaaatattgataaaattgtgtaccatactcgaattgagtccagatagtttgtatttgccgaacaacacccaaatccacttctatccactcctgtcccattccacgaggacgccataaagttccgttattatcatctacagcatattcgggacggaaatcggcatcataaaaagaagaagccctcaccttagcacccaatgccagattttttgatttcactacagaagatgccaatgcacctattccgtcatgagtgggaataaggggtttaatacttccatcttcggcaaactccatacggtccacacaaagctgacgatgaaatccgcggttggaatgcggattatcatgacggtgatagaccatataatattcattgccttcttttaaaacgctatgatgtcccggcccatgaattgttccgtcggtattggtttcaagaatacatccccgataggtgtacggccccataggtttgtccgaagtggcatactgcacccgataggtgtggtcgtgacaggaacccgaagaatacataaaataatagataccgttccgtttcatcacaaagggcgcttcaaaaaaatccgtggcttccgtatttggaatcagacgcgtttcagtaaaactcttcatatcggaagccagttttccggctccgcaaccgaaacctttataaatcccccaagttccccaatacaaatatacagaaccatcatcatccacaaaggtctgtccgtccaatgtaatggcattcgtcacaaaacggtcgggtacaagaacagcctcactttcgcccaatatatttttccaaggaccacgcggtgtttcactgaccccgcaatgaatcatacagggctgacaataaaaataataataattcccgtccgtatgtttcatcacatcgggagcccatatccaatgactgtccggccagttcataggcatcagcgtccagttcacaaaatccttgctggtccacacttgtgcaggaccgaagccggctccactgccatccgtagtggcatacatataatatgtatcgccaaatttcttcaccgtgggatcggcaaaatatccgggaataatgggatttcccgtacccgaagcattaaaactcttctgagcaaagcctgtagcagctcccaacaataaggaagcaacaaccaatcgtatcttattcatctctatatagcaaaattctatttgtccctgcgacgcttattcatgcaccacattatgaatgggaatttctatctcataaaaatattcctgcaacaaccgatacatatccggatcatacgtcttcagtttcgtgcggcggttcacccagttatgaactccgtttgcaggttcggcatagcggttacagttaaagaaagactgtacgcactcggcaaagtattcctctttattgctcaccgcatatgtcttttcccacagccctttccggattgcattctgacgaagtgcctccaaacgctcattaaagtctggctccactcccactatacctaccgtatgaataaggtgagcgaactcatgaatcaggatattctcacctacatatttatcctgcggcaatgccagcagattctcttctccgcaactggatgaaaattcatcctccggtgctccgccaaaaccacgggcacgccagttccaatatttaatgctgtcctcacaattgcagatatgggcaaactccggcaaatcgcaagtttcctcatctttaccgattatcatgacgtggcagcctttcttcaccatgtgtgccttcacatccggacgttttgccaacatcaaactgatgatatcacaagctttcaataaggcctcatcgctcacctttccggaagaggtgacatacagaccttctgtctctatgtatttctgatagaaagaaggaatatttttcccttcaggaataccggtaacctgtccgtgaacagggcaaagctccaacttcatagcgaatccacctcccgatgccagatgcaaagtcaaccggctgtctttatttatgcagattgtttctttccgatagtcctcggcctgcttgttggcattcacaccgtctttaaacaaaacagccgtataagacactccttcgggaaggaaagagaaatcgagttgcacatcacgttcatcccaattggtcataccaccgatataccagttcacatccttcttacgcactgttacaatatattttcccaactcgcccgaagcaataaaagtagaatccacctccacaggcagagaagccatgaaatccacacattcctgctcattcagatagttggtaggcgcatcacacaacatggtaaaaggagaatcgtgtacaatataggcagccagctgatgacaccgggttcccatgctggccggtgtgtaatacatggcgcgccaatccgccttcgtagcattgcgcatagctcccggcgtataatccaccggtcccgccatcatacggatataggggaaagtaacatcataaagaggcatattattcttgatatccgtccatttcacctcttccatgccaaacacgctttcaaaattgataatatgagggtaggtacgattgatacctgtcggtttgtaaatgccgtgcagatcaagggttaatttataccgagccgtcatctcagcgatgcgatacaccatttcgacggcagtctgatcatcacgatccagaaaatccactttaaaacctttgattcccatatccgcatattttttacaagctgcttccaactggctgtcgagtacattaaacaccgtccaaagcactatttccacccctttggatttgccgtatgctatcagctccggtaaatcaagttcgggaataacggtcagcatatccccacttttcggagcataccatccttcatccaacacaataaattccaatccgttccggctggcgaaatcgatataatatttatacgtatccatgttgataccggctttaaacggcactcctttcaaattccagtcattccaccaatcccatgccactttccctgtctttatccatgaggtatcaccgatacggttaggagaggccagggcatagaccaggttgttgaccggcatatccgtatccttctccgtaatggccaacacacgccacggataggaacgggagccacggctacgggatataaaatctgtggtttcggttacatattcctgcttccgccaaggataaaagtctgttttagccggataaggagcaaagacacctttcaatccatactttccctgctgtgactgcacaaacatgcccggataagcttccaaatctgactccaacagggtcagttttacgctgccgcaatccacagtaaccggaagaaaagccagtttaggctgtgcttttgacagaggagtgatgtcatagacattctgaaaggccattgccatcggttgcttgtcgtttgtggtataagggagataggcggtataatcttccttaaaattaaactcggcctgttcctcctttataatgatatccgaagattgtgtggtatagaatcgataggcgactccctcattgtatgcacggaaaatgattccgaacccgcctttcagcttcaagtcgagttcgttacctgttgcaacgaactccttgaaacggtaaaaaggtgattctatgttatcctttatctttttccttctttcccctgtgatacggggagttctacctactatagttccgtcttccagaaccaaagctatattagagtgtgagagaattgtgtcatttccatgcatcacttggtagaccagttcgtttccggcgctgatttccactttcaatgtaccatcgggtgaagagagtacatatttcttttccttggctgcaagtgaagcatttccaatcaataaaagcaaagataaaattgcaagacagagtttcttgttgtttttcataatctatcggttgtatacgttgttcacttgcaaagtaaaataaaaaaattacaagaaagggaagaaataatataatgtaatggtagaatcgtctaatatattctattttatggatttgataattagccggttgtactattcttccatttgtttagactatttttttatcacattattggagatgggttccggttatttttatcttataaggccattgtgcatcttctttcccgtatccgggattcatccaatgttccgtcggggctcccataacaaccagccacagatgggtcaatgttccgtccttgggagcgacatacctgatcactccttccgtatcgtttcctgtttccccgtagacggatttcccttcccgggtgacggcgacaaaaccgtaccgccagccggctctttccggatggacggagttgtaacccttcctgcccgcctcgccacggaactccacttccacgacacttcccggccgggggagggagaggggaacagcgttgaaaccgtaattctcgggacagttctcgggggcaatccggtaccagcccccttcggacggggtcatcctgcaggtgtattggttcgcatacggacgtgtctccctccatacccgttcaaaatcccagttgacaaaatgacggcaggcgtcaaacatctcgtcacagaactcttcctgttcaagaccgttcagccgtttgtaggtaatgacagggtcctccccacgttttccctggcggtacagttcggcgatgagaggcagaccgtgccgggttccccagtattcaagcacatagggggaatgataaatattatccaaatgcagataagccttgtgggtaagggttttgaacgcatcccaatgatatttctcatcggtcatccagtcaggatttacctgccagagcatccattgtgaagtcatctcaaagaagccgcaaccaccccaggcctctccttgctcgtcgcaggtgatttgtgactggaagctatgtcccagttcatgcgcgatgcaattcaacttcttgtcctgcacccggttgggggcaatccagagcgcaccgatctgcccgtcgtaatcccctccgtaggcagtgccctccagggaatagtttatcatgaccatcatgcggtatttgtcacatttcgagccttgcctagcaaactgcagcgtgtggtagaaataggcgtagaagttttccagcttctccttcagaccgggcaggtccaccttcatggaatgcccctccagctgtggcggattgccgaggtcattaccgaaacccttctcccagaagatgacaaagttctcggtatatgccatacggtgataactccaccggcttgccggattctgtaaatccatgccttgaaggtccttggggatgtaaatggacttgccgggaggtagagggatatcgctgtttccttgtgcgttggaacaactggttttcaacataaagagtaagaaaagaattatatattgtttcatttcattttataattaaaaagaggatggtttccctaaaatacattttagcgattccaccctctgctattagttagtcttcataaggtcttccatccaaattggggcatttatttagttcgtagcgcggaacaggcatccaatacatcgcttcacggaacgagcgtttttgaagaatcgtagtgctgtgtgtatacaaccttaattccgcaacactattacaaatataactttttaagtacctgagcaacaaaaagttgctcaggaatttgccatgtcagatttttcacctatcttagtgttgcaaatcaaaatatgtatcaaacccgacagacatggcaaaggtagcaattaaatccgagaaactcactccttttggaggaatattttcaataatggagcaatttgactccagactctcatctgtaatcgactcaaccctcggtatgagatgcaggctgtatggttatcaatacagcgaaatcatccgttcgcttatgagcgtttatttttgtggcggctcatgcatcgaggatgtcaccactcatctgatgtaccacctttcgcttcatccgacacttcgcacatgcagtgccgacacgattcttagagccataaaggaactgacccaggataacatttcctacacatccgacactggcaagacctacgacttcaacacggcagacaagctgaatacactgctcctcaattgcctattgtccacagggcagctgaaagagggcgaggggtatgacgttgacttcgaccaccagttcatagaggctgagaagtttgatgcgaagcctacatacaagaagttccttggttatcgccctggcgtggcggttattggcaacttgattgtcggcattgagaacagcgacggcaacacaaatgtccgtttccaccagaaggacacgctgaagaggttctttgaaaggtttgaacaaaacaagcttattatcaaccgtttcagagctgattgcggctcgtgttctgaagagatagtggaagagattgctaaacactgcaagaccttctatatccgtgctaaccgatgcagttcgctctacaatgacatctttgccctcagaggttggaagaaagtggaattgggcggcattgagtttgagctggcctccattctcatcgagaaatggaaagggaaggcataccgtcttgtgattcaaagacagaagcggatagacggcgaactcgacctgtgggaaggagaatacacctaccgctgcatccttacaaatgactacgagtcttccgagaaagagattgtcgaattctataacctccgtggagggaaggaacgcatcttcgatgatatgaataacggattcggctggaacaggcttccaaaatcctttatgggagaaaacacggtgtttcttctgcttatggcactcatacgcaacttctataaattcatcatggcgaggcttgacgtgaagaggttcggactcaaagcaacaagccgcatcaagacgtttgtctttaagttcatctctgtgccagccaaatgggtcaggacatcaaggaagtatgtgctgaatatctattcatgcaacaatgcttatgccaatgtgttccagaatgactttggataacaccgacaacttatagtcgtgattttgcgtattgcctcaagtcgcatggtggggtaaggggcatttatatgtctttatggtgacattcgatgcactgtgccccctttttactaacgatgcagattcttttcgcttctgtatcatattaggcgcgtagttgcggatttgaggtacaacaaggttccatccaacaatttataaactttcatcgccgtaggcagatttgctgtagagtaagcttcttccatacgtttccatctgcgcaggtcgaaaaagcgctgcccttcaaacatcaattctacttttctttcatattcatactcctcacgaatgtttattccggaagcatcaggcagatttacgcgcttgcggatcaaattgatgtatttcaatgcctccgcattattgcccaattctatctgacactctgcataattcaaataaaactcagccaagcggaaaaatatccaaggggtattgtccattatcgtttcatcccattgattgtagttagcattcataaacttacgcagataatatcctgtttgggtggcattccaatattcaccactggtgtaagtgggcgactgttctccagaaataactccctcttgtccggattcatatatttgtacagcatgattgtcatcgccgtatccccacaaagaaccatcatacagaatattcgcataaaaacgcatttcacggttatcatacggattgatttccgtagcaacgatagtactatctttgtacactatttcccctgtagtatcatctatgctcggtatctggatattataattttttaacccagacatactgaaatcagtaccgtccgccttttgataaacattggttatgttataagtaggaagccatactccccagccattgtatccattgtaggctcccggaggtgaagacatggggtagctagcggaataggctgtagagctgatacttgagtcatataatttttcgaaaatgatttccggattttccgcattgcagaatagagcggcatattcttcatagttgcttactgatggcaaactgtatatgccttgattggctaattcgataacttccatctgagcatcggaagcctctttccatctttcagtagaagaagtgccgaacaatgggcttgctttatagagcaaagttcgtgcctttacagctaaagcggctcctttggtagcacgtccgaagtcattactactatattctgtcggaagtaattgggcggcacggttacaatccgctacaatagaatctgccacttcatccatatcggcacgtgtttccgtccattcggcattcatatcaaatgtatggtaaactaaaggaattcgtccgtaaagggaatataactgatgataaaaaaatgcacgaaggaaataagcctgtccagttatttgctctttcttttcaatatcatcattcgaagttgcgggaacgtcgtctattctttccaatagttggttcgttttctttattccgttataatagaaataccatgtgttacctctggcatcagagtaacctacattgtaattgtcacatgacacattgcccagtgtatagacttccgtagcataaccggtacgatggtaaatctcatccgtatagctgcagaacgggacgccgttttggttttcaccttccacatagagataacaattgttcaagaaagtttctgcataatccaggttaccccacactgcttcgtcgctgatcttattgtgtggatctacgtctaggaaatcggaacaagctgcaaggctcattcccaacagagtgcatatagcacctttatatatttttttcatatatgtattcttttatggttaaaaattagaaagtgacattcagtccgaaagtccagcttcgttgaagagagtaacccctgatgccattggtcatttcggggtcgaagatgcctacactatctattgtaaacaagttgttgccattgacatacaagcgaagtttttctacccccaacgggcttatcaatgtcttggggaatgtatatcctatttccaaggatttcagacggacaaacgatgcatcacgtagccaccatgtggaactttgtgagttacggttatctactgaagaagccttcataaaagctcgcggccatttggcggcagcattctgttcggctgtattggattcgctccagcggccttcataaaaatctgtagccatattcatcgtaggttgtaccaagatctccgcatctgcttgtccctgaaagaacgcattgacatccatacctttccatgatccgttcagtgtcaaaccgaaaatccatttgggggtagcggatttatcccggcggacggcatcatcccaggtaatgttaccgtctttgttcgtatcttgataaatcaggtcacctattttggtaccagaaagatggggagtgctttctatctgctcttgtgtctggtaaatacctaatgctttgtaataggtacctccgtcgatggggtgtcctgtttctcgttgccatgcaggagtatcagccgcttcatctgcatataccacttcatttttcgcataagtaacatttcctgtcactccccattcaaaatcacctttgctgtcacgataagtggcaattgcctcgaagccatgattctttactttacccaagttctcggccggaagtgagagtcctgaataggtaggaatggaagcattgcgtgtaatcaagatgtcgtttcgattggactggaaataatcaaggtccaaccctagttttccattgaggaattgtgaagaaaaaccgatattccatgtcttggcagtttcccaggttactaacggattagcagtaactgtttcatagatactttgtacggatacaggagttttcccgaaagcataataagaatccgtattaaaactatacatggagaggtattggtaagctgtaatattatcgttacccatcataccccatgagccttttaatttaaaaaaactgaagacatccttcaaaggttcaaaaaagttctcttctgagataacccaaccggccgataaacccggaaaaagaccccaccgatgaccgggagcaaaattcatggaaccgtcataacgtaaagttacctcggccaggtatttgtctttatagccatagtttacgcgtccgaaccagttttgacgggctgtttcattcgaattcccgctattgctctggtttgtcttatctgtacttccataatccaagtcgggtagtgcggaagatacaaagttggtgcggtagccatacaaataattataatgatatttattttgttcgtatgccacaaaagcatttatctgatgcgcattattgaacaaatggctatatccgatacggacgttgagggtaatactgctactgttgctggaccatgaactgacactgacagaaccggttgcatcacgttgattggtatattccccactgacagagtcatacgaataaatatcataggaagtattcgttgttttaccattgttgaatgtatagtccaaagctgcatatccctcggcatacagtcctggggtgatgacatccaggtcgatacgaattttcggcttcaggttcaatgtattgttggtcgttttactggtcccaggaagatcggataccatcaatacggcattattcgtaattccatcgtatcctgtacgtagcaatccgttaggatagtaaggtgcagacatcggactggtagtaagaaaataactaaacagatcctctgtagtccgtaccccacggttatctacagtttgccgtcccagaatatcaaaaccaaacttgatagcttttgtaattttagcatccagattcgtactgaattgatattggttgtaattctgcggactgtttttataaatcacatcctgatacatgtattgagccgaagaatagaaagaaatcttttcatttcccccactaatggcaaggctgtgttctgtattggttgcccaatccttagcgacagcgttccaccaattagtatcgggataattgataggatcacttccatcttttattttagtaagtgcggtttccggataagtcaacgaattgccctgcgctgcatcgaattcgtttacatatgttgcatattgataggcatttagcattttaggcacacgtgtcggctgagagaaagatacatttccactatagtttaatttcacctttccttctttaccgcgtttggtggttaccaaaataacaccattggcggcacgtgctccataaatcgctgctgaagcatcctttaatacagaaatcgactcaacgtcttccgaattcaaacgactaaaagaacgatctgcgataccatccacaacaatcagaggcgaggtatttcccaaggtgcctttaccacggataaggatcgtcgcatcatcggctccgggttcgccacttcgtgtattggcaatgacacctgcggtctttcctgctagcgtattcgttaaattgacagttgagactttcttcagttcttcaccacctacctgtgaaacagaaccggttagtgtggctttcttttgagtaccataacctaccactactacttcatcaagcatttctgtgtcttccttcaaattgatgttaagtgttttttttccgtttacagggacctctagcgttttatatcccacataggatacaactaaagtagctttagcaggaacttccagcataaagttaccgtcgaagtcggttatagttccattagtagtaccttttatcacaatactagcaccaatgatgggttctccatttgcatctgtaatcttaccattgacaatgctgttttgttgtactatcgaggtagtttgggtattttcccttggtgctgcataagcagcactaattccaatacccgtagtaaggaaaagacaggttgtagcctttagcaatgtcctgcagaataaggcccggttctcatgtgttttcattataattttttatttaaaaggtttatattcttagtttactttccattcaatcacccctcccgaagctcctttctgcaattgtgctgcaattttaagcccctttgttttgacaggaagaagaagaaaataattatacacatatattactgcatgttttattttaagcttggcatgtgaagatgttaatatgagtcacccagtattgttttatcgtaaacggataaaactaccatggataacaccctactcccgaacgcaattcttatcttattatctatccatggacgacctgaccagcggattcaacatcggcaccaattacacgctgaatccacaattcaatgaaatgacaggattcacagaaaaagatgtacgggatatgctggaatattactccacaacatgcccattcaatcattcggtagacgagttgatagaactgattgcttttctacttcggaatgctgaccatcagcggaatgcataaaggagaaaccaaactcaccatccccaaccaggtggtacgtgaacaactctttgcctacattctggatacttatcatgaaaacgacttgactttcgacaggtatgaaaagaggaagcttgcctcagggctggcttatgatggcaaatggaaaccttactttgaatacattgccggatgcctgcaccgttatgcctcgcagcgggacaagcagaaaggtgaatattttgttcatggttttactcttgccatgaccgcacaaaatcctttctatcgtcctgtgtccgagaaagacagtcaggaaggatacatcgacctgttcttgcatccgttattggatatttacaaagacatgagccactcctacatcatcgaactgaaatatgccaaaggaaaagacagtagcgaacggatagaacaattaaggcgacaagccattgaacaaactgaacgctacgcttcgagcgagtctgtgcagaaagcgataggtcctaccatgctacataaaatcattgttgtatatcaaggtatggaaatggttgtttgtgaagaattgtaaccgataagaggcagtgtctgcccttacaatggaagcattcattcgtccgttctatccacgttttcatcgaaagtacaaaattgttgcttcttgccgcatttgtaattacaaagataagatgccattttttcgatgatttttcgtatcagtttcttctgcatcagcacattaccattccaaattatgcgcagtatcttgctgtaaatcaacaatatactgtgtaaatagattccaagtccccttgaaacggtttgccattttccgctgtcaaattcggcttgacgtatacagcttgttttaattcctgtgccatagctgtggtcgcttccttgcaagagagcatagctgtggcatattttgtctggctgcgttcgttgcttcgcctaggtgaagaggcgaattcactttagtgaacagccattttcactagggtggaatagttgcttcacttaggtggaatatcaaacggaacggagtgaagatacgatagaaacaggttcttattacatacgcaacaaggttcaatagccgaaacaaacagtatcctgtcctgtcaggtatgaactatgatgcccacgagtagccaggaggcagtgagaggctgactctacctcctgtccgctggtattcccgaatgcgagcattcccaaaaacggatttgtttccccaccgacataccaattgagggggatttgagagacttttacaccggaagtgattagtaatgtgcatattactgtgacagagcgcttttgtgctttatgtatatccttatgctaaaacctaaatttgagtaagaataatctatcagaggctttgtttcttcttattacgaatgacagacgtatcacctttatcagttggaatgaatccctaccccattcctactcaggaaagctgccaatgtattcctgctgactttcaatttcctcgccatctccgccttactggttcccgcctccagcatagccttaattttttcttcttttcccgtaagtttatatttcgagttatgtcctcccatgggacgtcccaacttttgtccggaggcgattctgcgtgcaagtccctcacgggtacgttgggaaatcaagtcacgttctatttgtgcggagagggaaaaagcgaatgccaatatttgagattgtatattatttcccagttcatatttctctttcaccgtgagcaggatgacatttttcaacatacatgcattcagtatactcattacttccatcaatcttcttcccaaacgagagatctccgatacaatcaatgtatcccctttctttattcttttcaatagtacgccaagctttctgtctttggctgaccgtgttcctgaaaccgtttcttccacccacacatcaatttggaaatccctctgtttggcaaaacgatttatctcgaaccgctggttctctacagtctgtttatcagttgaaacccgaatatacgcatatatcatagctgcatcattaagttttttattgaataaggaacgccaatctaacttatattatcagagaaggaaagtttcaccggatcttattgaggttttctaagaagaattaagtatctccaactattcaagcttaaaaaacagagaaatctgcttaatccttgcctttacaagataaaacgattgtccaatagaatgaaaaaattgtctatgataatagtataaatcactgataatcaatattgttatattaaaactggattgatcatctttaagacgattttcgcagtataatagatttttcttttatctacttaatggtttgttcacttactttgcatctgttgacatagttgatactgaaataaaaaacacagatatagtatgaaaaacaaattgcaaatagtatggagcagcattgctataataagcgtatgtgcatgtagtacgccttatacacaacctgatgcccctatcaaagaagttcccttcacccaagttcatttagatgataatttctggacaccgcgcatcgagactaaccgcaccgtttccatcccatccgctttcaaagaatgtgaaaagaacggccggttcgataactttgccattgcgggtggtttgatgaaaggcgaacatcgcggtgacttttctttcgacgataccgatccctataaaattatagaaggagcatcttactcgttagccgtaaaatatgatgagaaactggatcactacctggacagtgtaatccatatcatagctgccgcacaggaaccggatggttatcttactacctgtgtaaccaatcaatgtacccgtttatccggttggtggggcacgcaccgttgggaaaaaatcaacagtcacgaactctataatagcggccatttgtacgaagccgccgttgctcattatcgcgccaccggaaaacgtacgttactggatgtagctatcaaaaatgccgatttggtatgtcaggtcttcggacccggcgaaggacagatccatcgtcccagtggtcatcctatcgccgagatggctcttgtcaaactatataaggtgacaggcgatgagaaatatttgcagacggccaagtattttgtagaagaaaccggcagaggaacagacggacataaactgagcgaatacagtcaggatcacaagcccatcctgcaacaagacgagatagtaggtcatgccgtccgtgccggatatctctactccggagtggcagatgtagccgctttgactcatgataccgcctatttcaatgccttaacccgtatttgggaaaatatggccggcaaaaaactctttatcacaggcggaatcggttcccgcccacaaggtgaaggattcggtccgaactatgaactgaataatcacacagcctattgcgaaacctgcgcctctatagccaatgtgtattggaatcatcgtatgtttctcgctacgggagatgccaaatatgcggatgtgctggaacgcgcgttgtataacggagtcatttcgggcgtatcactcagcggtgacaagttcttctatgacaatccgttggaatccatggggcagcatgagcgccagcactggttcggatgtgcctgctgtccgggcaacataacccgtttcatggcttccgtaccttattatatgtatgccactcaaggcaatgatgtgtatgtcaatctctttatccaaagcaaggcggatattgaaacggaaagtaataaaataaatgtggaacaaactacaggctatccgtgggacggaaagataagtattgccgtcactcccgaaaaagaacaggagtttgctttgcgtgtgcgtatccccggatgggcgcaagacgctcccgtacctacagatctctactcatttacagacaaggctcaggcttatagcatttctgtaaacggctccaaagtcaatgcgaagcaatatgatggttatgccacccttgtacgcaactggaaagcgggtgatgtggttgaaatcaatcttcctatggaggtacgtcgtgtgaaagcaaatgaccaagtagaggatgatcatggcaaactggctatagaacggggccctattatgttctgtttggaaggacaagaccaagccgacagtactgtattcaacaaattcatccccgatggtactccgatggaggcttcttacgatgccggtttgttgaatggcgtaatggtgctgagcggtacagctaaagaaattgacaggaatggtaaggtaaaagatgttcccttcaaagcaattccttattctacatggaacaaccgcggtgccgaccagatggctgtatggattcccgaagcggccgagtatgcccgccccactccggaacctaccatcgctagcaaagcacgtactttgatgatacaagcccccatacagaaagacgctcctgaatcggcttcagtggaaacatgggcatggggggtaaatgaccaatgggaacccaaacgttcatcggatatctcgaaaccttaccactattggtggctgaagaacggtactgtcgaaacactggcttatgaattcgaccagccttataccgtatcgaacgtacaagtgtattggttggattttgaccattatgacggagatttccgtgtgccggaaagctggaaactgtattataaagaaggcgacaactggaaagaggtagaggcgttaactgaatatactgtaaaaaaagattgctataatagtttggatttcaaccctgtcaaaacaaaggggcttaaaattgcagcacaattgcagaaaggagcttcgggaggggtgattgaatggaaagtaaactgaatgaacatataaaccttttaaataaaactgtatgatgaaaacacatgagaaccgggccttgttcagcagggctttgctgaaggctaccacctgtcttttccttactgcgggtgcaggagtcagtagtgtatgggcagcaccggaaacaacagaatctatgagcactgaaatggtacaacagcaaactgtaaccgtaagcggtgtggtgaaagacaagaaaggggaacccatcattggtgccaatatcatggaaaaaggaacgaccaacggcaccattaccgattttgacggtaactatacattgaaagtaaaaaatgccaaatccatattggttatttcttatatcggttatcagacacaggaaattcctgcaggaaatagtggtaagaaagatattaccatgcaagacgattccgaactgatggatgaagtagttgtaattggttatggtacacagcgaaagggagatgtaactagtgctatttcaagtgtaaaatcagaaagttttgtgaagggggcagtaaccgatgcgggccagctgatacaaggtaaggtagcaggactgaatatctctttaccttcaggagatcctaccggcaacacacaaattatgctacgtggtatttcatctttaaaaggtgggacttcaccattagtattagttgacggagtgccaggaagtctgaatacagtagcccccgaagatgttgagtccatcgatgtattaaaagacggctcagctactgccatttatggtacacgtggtacaaatggcgtaattattattacaaccaaacaaagtcgtaaagaaatggctcccaccattgattataatgggtatgtttctgtatcaaacatcttaaacagacctgactttatggatgctgatgaccttcgtcagaaatggaatgaaggatatactttcaacggagctaacttggaagatttcggagccgataccgattggctgggtgaactgacccgcacagctgtttctcattcacacaacttatctttaagaggtggcagtaaaaacaccaattatacagcctccatcaactataccaaccggcaaggtacttttataaagactgactttgaagctataaacggtcgtatggacatcactcactctatgtatgacaataaattaacagccaatgtcagtacattcgtcagccagcataccatgccccgcagttggaatacatacgcttatcgacaagctttgattcacaatcctacagaacctgtaaaagatgagaacggcgactggtttgagcgcgacttgtatttttatgataatcctgtaagttatatccgcgaaacaattggtgaaatgaaacgtaaaaacatccgtttcaatggcagcctgactttccgcccaattgaatctttaaccttgaaagccatgtatgcccgtcggagtacgacttctaccgatggatattaccaaaccaagaaacatgtatctacaaccaagagtggccgtaacggctatgcatatcgttatgattctgattttgataataatctgatagaattaacggccaactttcagaaagcattcggcaagcacaatgtcagtgtattgataggttataactatgaagacaacaccaactccaacctgtccatgtccaactacgattttcctaccgatgcttattcttacaacaaaatggaagcaggtatggccttgaaacgtggtgaagcttccatgaccagttataaaaattctgataaattaatcggattattcacccgtgtcagttacaatttcaatgaccgctacttattgatggcttctttgcgtcatgaaggctcttccaagtttggtaaagatcataagtggggtaatttccccggcatctctttaggatggagaattaacagagagaattttatgaaaaatgtgaattggatggataacctgaaacttcgcgtgggatacggtgtgaccggaatcaatgtagccgacccgtacacatcactctcaagtttgaattataatggcgctttcctgtacaatgggacatgggtcaaagcattggaaacaatccgtaacaacaacgctgacctgcgttgggaaaagaaacatgaattcaatgtaggtctggattgggatgtcctaggaggacgattgggtggaaccattgactactatatacgtagaacaaaagatgctctttgggactacgaggttcctgttccgccttatatgtatccaaccatgctagccaatgcatcggaaatggaaaataaaggacttgaaattctaattcgtgctacgcctatccagacagaaaaattcacttggaataccaatgtatcctattctactaattcaaacaaggtcgttgcactatccagcgagaaattctcgatggaccaagattatttctatacagggtataccggagaacccattcaaaccactactcatatcgtccaagtaggcaagcctataggtactttctatggtttgaaatcggttgatattacagatgacggactatggttggtagaaaacaaaaaaggtgaacatgttttagccgaggaaactgatgccactgactggcaagtattaggtaatggtattcctaaacattatctgaattggaacaataccttcaatttctttaatttcgatttaagtataaatatgcgtggtgctttcggcttccaaattttgaattaccaacgtatgtattatgaaaatgcaaaacctgaaatccagtacaaccgcctgaattctgcttttgacaaagtatatggcaaaacccaattgaaagatgaccaacgctatgtcagctattacgtagaggacggtgattactggaaaattgacaatgtgactttggggtataccttcaaactatccaaacagaatatcatcaaaaacctacgtatctatgcttcagtattgaatctagctaccattaccggttacaagggtatggatccggaagtaccattgagcagcaacacctatggattattggatgccggtactgacaatcgcgacaagtatcctaccaatcgcacttatacttttggagttaatcttacattctaagtctaattaaacaaaaaagaacagttatgaaactatttaaatatggtgtttatgcactctgtgcatctgccatgctcagtataagcagttgctttaatttggatgaggagccttattctgaaatcattgaagaagactatgtaccaaccgaagccgatgagatagccttgttggctaccacctattcacaattacgctttgtgatggactggtatggcttgtttgacctacaggaagaatcgggcgatgtaattgtcacacctacccgccctaacggctgggatgacggaggtacttacaagcaaatgcacaaacacacttgggacaaccagcaaggacagccccaaagtatttgggattattgctataaaggcatagccaatgccaataaaatattaaaacgtgccgatgaaggtttttttacagaagaaagtaaacctaaagtcgtagctgaggtaaaaggagtacgtgcactttggtactccattctttgcgatacacatggaaatattcctatacaaaccagtttcagtgaagaggttccggttcaatctactcgtaaacaagtttttgacttcattatcaatgaactgaaagaagtaatgcccaatttgcctactgaagtcaataaatccacttatggcagactcactcaatggggggccaaatgcttgatggcacgtatgtatctgaatgctggggtctatacaggaactccaatgtggaacgaatgtatggaacaatgtaacgatatcattaacagcggtttgtttagtttagaaacaaactacacagatatcttcaaaacagaaaactccggatgtgtggaaacgatctttgccattccttatgatgaagtttataatgaaggggacaacaatggtcctgtttttggagcccacatgaaatttctatcttcaaacagtcgtaaggtcttcaatatgcaaaccaccccatggggaggttcagcagcaaaccctcagttcattaacagctatgatcctgatgatatgcggttaaaatatacatggctgcaaggtgaccagtacagcccagacggagtactgatcaccactttccccaataagctacccagtatttacaaaacagacacagatgacggttatcgggtaggaaaatacgaaatcaaggtaggagctaaaagccttctaagcaacgacttcccttatttccgttatactgaagtattgctgatgaaagcagaatgtctactccgcttaggacaaaacgaaaccgaagcagcccatatcgtatcacagatccgtgagcgtgcattccgtgaatcggctcatccggaaaaagcaacggttgatgcagcttggttgaaaggcgatacacacattaactatggtacgcttgacgaaaaaggtcagattgatgatgcgggtaatacagaagtcgtagaattaggcggactttatgatgaatggggatgggaatttgcagccgaggcccgtcgacgtacggatatgattcgctttggaacctatcagaagaaaagttggtttaaccatactccgactgccaatgacttgaatggcaactctaccctgttcccgattcatttagatcatcttaatacaaatcctaatttacagcaaaatccaggctatgccggtaaataagaaataatgtgatagaaggtaaccttctttcttctcgatagttactaattatttaagcaaatatttatttttccagcccggtttaagttattagaaccgggctttatattcccatctcttataaaatcattatttaaaatatgctcatggaaatgaacagatatttatcttttactctctttacaggattatccctattgacaacaatacccgttgaggcgtatacactaagtcctaataaaacagcaacatccaccttgcagacaaatgttatcgaagtacgaagcataacttctgtacaacccatcgtggtctattgtcctgtgggaactgttccccaattaccttatcaagtatgggtgacttattcagacggacaaggtgaataccgtcaaactaaatggtccaattccgctttatccacagaacaatcggaagctgacgataaagtttatcccatcggaagccaatacacaataaacggattcattataggagacgatactacagaaaacggatatcctatcactgctaaaatagaggtggtagacactaaaaatacaatttttcccaagctaatagcccatactatccccttaaacaatgtaaagattgacggcaacaaccgcctgacctccaatcgtgatcttgccattaaagagattatcagttgggatgtaagccaacagctatataattatcgcgacacttatggcctgagtaccgaaggatatacccgatccgacggatgggactcacctgaaaccaaactaaaaggacatggttccggacactatatgtccgcactggcccttgcctatgctgctgcaacaaatccttcgcataaagaaattctacgccgtaacatcacccggatggtgaatgaactgcgtgaatgtcaggagcgtacattcgtatggagcgaagaattaggaaggtatctcgaagcccgtgattttgcccctgaagaagaattgaaaaagatgaagggtacatgggaagcttttgatgaacataaaacaaaatgggctacttatggctatggttatctgaatgcgatccccccacaccatcccgcactgatagaaatgtatcgtgcatataacaattcggactgggtatgggccccctattactccattcacaaacagttagcgggtctgatagatatcgcaacttatatggatgataaaagcattgccgacaaagcattgctcatagccaaagatatgggtctgtgggtatggaatagaatgcactaccgcacttatgtaaaaaaagacggaacacaagaagaacgcaggacacgtcccggcaatcgttatgaaatgtggaacatgtacattgcaggtgaagtgggaggtatgggagaatctttagcacgtctttcagaaatggtcagcgcccctgaagagaaggcgcgtctgatagaagcatccaattgttttgatagtccggccttttacgaaccgctttcaaagaatattgatgatatacgtaacagacacgccaatcagcatatccctatgatcatcggtgcactgagaagttatttaagtaacaatgatacattttattatcatgtatcccataatttctggaatttaatacaaggacgttatcgttattctaccggcggtgtgggtaatggcgaaatgttcagacagccctatacccaaatagtaagtatggccatgaatggcgtatctgaaggagagagtcactcaaatccacatatcaatgaaacttgttgtacatataacttgctaaaattaacaaaagacctcaactgttttaatccagacgatgcccgttacatggattattacgaacggacactttacaaccaaataatcggctcattacaccctgaacactatcagactacttatcaatatgccgtaggactaaatgcatcgaaaccatggggcaacgaaactccgcaatctacctgctgcggaggtacgggatctgaaaatcatgtaaaatatcaggaagcaacctactttgtttcagacaatacattgtgggtagccctttatatgcctaccacactccattgggaagagaaaaatatcactttacaacaggaatgtttgtggccagcaaaaagctccacaattaaagttactgccggagaagcccgatttgccatgaaactgcgagtaccttattgggccaccgacggctttgatgtaaaactaaatggaatctctattgccactcattatcaaccttgttcatacatggtaatacctgcccggcaatggaaagaaaatgatatagtagaaattacaatgccattcaccaaacatatagactatggtcccgacaagctaccggccaaaatagcaagtaaagatggacaccaacttgaaacagcctgggtaggtacattaatgtatggaccgtttgccatgacagctaccgatatcactaattggacggaagcaacactcaatatagactcacgtcttgccagtattgccgttgttgaacctaacggtctgcaaaccggtactacaggaaatttatatacactaatgcaaggtggacgaactttccaaccagattattatcgccatgaccatacaactcattacttccgcatcaatcatattaaagatcctactgtagaactgaaaatggctctgtcggcaaaattacaagaaactacagcatttagtaaaagccattacacaaaagcaagtttcgccaaactaacaaccgctatacaagagggagagaaactaatgaaaatatctcctctgacagaaactaccatttctacttgtgtagacaatattgacaaggccatagaatcattagtcgcctcccgattagataagagcaatcttgaagccagtatccatatagctaaaaaatgtaatccggacctttatactactgatagttttaaaacattgcaagctactcttgaaaccgcccatgaagtaatggataacattgatttacaaaccgttattgacaaacaaactttatcactacaagatgccaccgcttctttggtactggcaaataacgtagataaaacagaattaaaggagttacttaatatagctatggaacgccaaacaaaccaagaaaaatggaatgctctcgcagtcaaggttcctgaatttgctccttgggctcatttcgggtttacccgtttgaaacgtgcattggaacatgcccaaaatgtatattttaataaggataaaaactactcccaaggagaagtcaatgccatagtagctaatttgaataccgtcatcaatacaatgagaccgggtaacttacccgaaatggaagacttaaggcctttatccgctctattaaggcgcgtgggcacaataggtgactctacaaatccgacattaaaagatgctgttgcattcactgaaatggtcataaaatatgtaacagacggcagtggcacacatgatatgatagaaacagctatcaaccgcttaaaatctgcagcaggattatgataagctagcttttagagaatgtctggaaaggtctattgaaagattcatctggaatcctcactttttcttcgaattttctcttttctttctcagaaaagtagtaatcttgcataagatttagaaataagaagaaaatactatgaaaagactagtcctattgctattgaacttactgatgccgatgattctgtttgctgcgtccaatgacctctgtttccgtcatttttctgtagaagacggactatcatccaattcggtacgtgctttaatgcaagataaatacggttttctatggataggaacggatgaaggactgaaccgctatgacggtactactgtaaaactctatagactgaaagataggggagctaatgaagctatttcatctttatacagcaccctcaacaagatatggataggtacagacgaaggcatatatatctatgattacgaaacagaagatataatgccttttgtactggccacctccaaaaatatccatattgaaacaaatacgaaccatattgtcgaagataaagacaaaaacctatggttcactacggtaggacaaggaatattcaaatacaacaccatcaccaaccacttggagcaatacgaatttaaaaacgcaaatggtttaatggcaagtgtgctggtggatagtgaaaaccaaatatgggccattaccaattggggaaactcaggtcttttcaaactgaataaagcagaaaataaattcgagacttttccgctctcctatgaaagcggaaagcatgactcaaacgcattggtcatgttggaagactcggaacatacactgtggttaggaacctgggagtgtggtttgcaaaaaatcgataaatacagcggaaaggccactacttatctgcatccgacagacggaaaaggtgccacccatattcattctatcatggaatatgcccctcaccagctactcataggctcggatgacgggcttctgttattcaataccattacagaggaatatcaattgtttacagaagatgaaacaaacccacattcattgtccaaccgttttgtttatcctattataaaagatcatgaaggtggaatatggatcggaacttactatggaggagtaaattatatctcacccaatactggacaattcgaaagttttgtccactcacgtttctccaattctgttaacggaacagtcatcggacggttctgcgaagactctaacggagatgtatggatcgcttcggatgacggagggttaaaccgcttttctcccaaaaatagaaaattttcccattatttgcccttggagggaaaaaacagtctgtcctatcacaatgtacatgcactttgtatggacggtgataatttatggatcggtacttatactggaggggtaaacgtattaaatctgcaaacgggaacttttaaaacatattctgcctatcaggataatcccgcctcactggacggaaccagttcttatgccatattcaaagacagaaaagagagaatatgggtcacctccatgtccggagtaaatctatataaccgggaaaaagataatttcacccgaattaaatacttggacgcactgaccattgacattgaccaggataccaaaggaaatctctggttctccacccaaggcaagggattatttaaataccatccagaaaaacagatatggaagaactatatacatgaccataaaaatccgaactcactggcaaacaaccaagtgaactgtgtactgattgacacaaacggagagatgtgggtgggaaccatgaacgggctctgcaaatacaatgcggaagaagatgcattcgaaactttacctcttgaaattcccagtcacaatatatgcagcatcatcgaagaccaacgcatattgtggctcaccaccaccaaagggctagtgcgctacacccctggagaaggttgccgagtatttactaaaagcgacggactgcaaagtgaacaattcctacctaatgctgccttaaaagcatcggatggaaaaatttatatcggctcggtaaacggatttaatgctttctacccccatcagattaagacaaatgtgatgcttcctccagtaatcattacagaactggaaatagataataaggaaatccaaactggaaacaaactgcttccaaaatctctcaaccagttggaagaactggagctatcctataaagaaaatgcattcagcttgctttatgcctctttaagctattgcacccccaataaaaacaaatacgcctataaactggaaggatttgacaaagactggaactatgtaggctcccagaataaggccacttacaccaatttgcccgcaggaacctatcttttcaaagtaaaggcgaccaataatgacggaatatggaatgaaaaaggaaccagtctgaaaatcaccatccaccctcctttctattggtccaccgcttccaaactgctctattttatattggtttgcatagctttcggattcgtcatccgcttcatcatcaaacggacagagaagaaacatacggctgaaataaacaaactgaacgccaacaaggaaaaagaagtacacgaagccaaaatcaagttcttcaccatgatagcccacgaaatacgcacaccggtatcccttatcataggacctttggagaaaataatgaaatcccccgtgtccctgccgtctacagtacgcgacgatctaaatattattgaccgtaacagccagcgtctgctgttcctggtaaaccaattgctggatttccggaaggtggaacaggaaggaatgaaaatgaagtttgcttcccaaaatatccaccaactgctcaaagcggtttgtgaacgtttcgaacctttcatcgcccaacatggagcacggcttactgtggaatatcctgaagcagatttcacagctatagtagacagtgaagcggtaaccaaactagtcagcaacctgttaaccaatgccagtaaatacacaaaagatgaagttactcttacctgtatcgtacagccggaacaacatacttttataatccgagtgacagataacggcatagggatcagcaaagaagaacaaaagaagatattccatccgttctatcaggctatggataacaagccgggaacaggtatcggcctcagcattgtcaaaagtattgtagaatcacacaatggctgcattgaagtggaatccgaagtgaacaaagggtcatcttttatcgtaacactgcctgtagaacaagcacaagtcctgccacaggatacgggcacatcactattgaacaacccagccattcccgaagaaatcttgcaagaggacctctccggttctcctatcaaacataaaccaaccatgctgattgtggatgataatgaggaaatgttgaatttcctttcgagtagtctggctgataaatacagcatacttaccgcagaagacggtatagaagcattaaataaactcaaagaaaacgaagtgacactcattgtaagcgactggatgatgccacgcatggacggagtggaattctgcaaagcgataaggactaaccaaactaccagtcatatacccttcatcctgctaacggccaagacagataccaactccaagatagaaggtatggattgtggtgcagatgcctacatagagaaacctttctccatgcaatacttggaagcatgtatcaagaatctggtagacttgcgtaatctgctgcgtcagaaattctcgaagatgccgctggttccgctgaacagcattgccaataattctatggacgacaagttccttacccgcatgaatgaaatcatagaagagaatttctccaatccggaattatccgtagatttcctggccgaaaagttgtgtatcagccgttcgggtctgtttgccaaaattaaaacattggccaatatcacccctaatgaactgattcaagtggtacgtttgaaaaaagcagcgatcttgctagcagaaaacaaataccgcattaatgaaatctgttatatggtaggattcaataatccgtcttatttctccaagtgtttccagaaacagttcggcatgaaaccgggggaatttgtaaacgggaaaagagaagaataaaaactaatcaaaaatcattccctaaaaataaaaaatccggtttccccttttcagagaaaccggattcatgatgaacgagtgattttatttcaatcaataattattcttcttcacttcgaaataagcttgcggatgcagacatgcaggacatacttcaggagcttccgtacctacataaatgtaaccgcagttacggcactgccatacagtttcttccgctttcttgaatactgtgccttcttccacattcttcaataaagccagatatctttcctcatgccccttttcagcttcagcgattctgcgatacatagtagcgatagcaggaaaaccttcctgatcggccacatcagcaaagtgagggtaatcagtagtccattcttcattttcaccggcagccgcagcttttaaattctccatagtggtaccaatgatacctgcaggatagctggcagtgatttctaccataccaccttccaaccatttaaacatacgtttcgcatgttccttttcctgatcagctgtttcagtaaaaatagcagcaatctgttcataaccttctttctttgctgtacttgcaaagtaagtataacgcattctagcctgtgactcacctgcaaatgaagtcagcaaatttttttctgtctgtgtaccttttacgctcttagccataataattagttttattagttagttattattcaatcatcttttggtaatacaaagatatatcttttattccaaaattgtattcattacaattatatttttatatttaattaaacgttcactttatataaaataaacaagaacacctatatttgtgttcacaacaacattaacatttttcattatgaaaagcatcatcaaattattcacttttcccctccttactataataggatttaattcgtgtgcgtccataccgttaaaggtcggagaatctgaaaacaactccacttacactgtcagctatctgtttgaacatgacggttgcaaggtatatcgtttttacgataaaggaaattacgtttactttactacgagaggagatgtaaccagtatcacaaatgattctaccgcccaacgcaccattactatcaacaaaacaccctatgaataacaaaaatacgaatttaaatagaataataccttaatttatacattaattttatctacttttgcaactcgtttaaaatcatagcataaagtagttgacaaatgaaagcatttgaattcaagccgaagctcttcactaccctacagaattattcaaaagagagcttcatggccgaccttatggccggaattatcgtaggtattgttgcacttccactagctatcgcatttggtatcgcttcgggagtttctccagaaaaaggcatcatcactgctattgtagcaggatttatcatctctttattaggaggaagcaaagtacaaataggcggacctaccggagcatttatcgtaattatctatggtatcatccaagaatacggcatcagcggattaacagtagcaactcttatggcaggagtactccttattttattaggtgtattcaagctgggagctgttatcaaatttattccttatcccattattgtaggatttaccagtggtattgccgtcaccatttttacgacacagattgccgatatcttcggactgaacttcggaggagaaaaagtaccgggagactttataggcaaatggatgatttatttccgtcattttgatactgttaattggtggaacgccattgtcagcatagtcagtgtcctgatcatcgcactgactccccgattctcaaaaaagatcccaggctcgctgattgccatcattgtagtgactattgccgtatacctgatgaagacatacggcggaatcacttgcatcgacaccattggcgaccgttttaccattcagtcacagttgccggatgcagtagtacccaaattagattgggaagctatcaagaatttatttccggttgccatcaccatcgctgtactaggagccatagaatctctgttgtctgctgccgtagctgatggtgtcattggtgaccgtcacgattcaaacacggaactgatagcccagggcgcagccaatattatcgctccactgtttggcggtattcctgctacaggagccatcgcacgtaccatgaccaatatcaacaacggtggaaaatcacctgttgcaggtatcattcatgcagtcattctgttgctgattctcttgttcctgatgcctctggcacaatatatcccgatggcctgtctggcaggtgtattggtgattgtttcttataacatgagcggctggcgtactttcaaggcgttgctgaagaatccgaaatcagacgtcaccgtactactgatcactttcttcctgactgttatctttgatttaaccgtagctattgaagtaggtttgctcattgcctgtgtattgttcatgaaacgtgtcatggaaacaacagaaatatcggttatcaaaaatgaaatcgaccccaataatgaatccgatctggaagtgcacgaagaacatctcatggttcccaaaggtgtggaagtatatgaaatcaatggtccctacttctttggtatcgctaccaagtttgaggaaatcatgtccgaactgggcgaccgtcccaaagtacggattgtacgtatgcgtaaagtaccattcattgactctaccggtattcacaacctgactaatctatgtgaaatgtctaaaaaagaaaatattcagattgtgctttcgggagtgaatgaaaaagtgcatcaaattcttgaaaaatcaggatttaatgaattactgggaaaagaaaatatctgccctaatattaatgtagcactggaaaaggcaaagggcattatagaagaataaaacggactactctattaaaagaatttatctatggaaaagaggatactcccgatagctggaatatcctctttctcatctaaatacttcaggttggtactactccaccaaagagtggcatgaatagaatgccaatatccgttctttcagtaaataggtatatttagtctgtgattgttgggacaacgcatctgctaatttcatttttatctcattatactcatatacagccgactttccagccatatacttctctaacgcataccgatgcgcctcccgattggcagctaccgctttgatagtagattcgtatttctcaaaagctgccaacgcatccatatatgctttctcaatatccttatagagacttttcttttcattttccaatgacaagcgggcattattctcttccaaacgcgctgtttttacctgattcctcgtagagaagcggtcaaaaagagggatgcttaatgtgaaataaatgcttttctgcatattgtttttaaactgctgataaaaagacggattcattgcacgacgagaataatagtaaccggtattgattccggcacccaaaaaaagctgtgggtaatatcccgacttgacaacttttgtacttttcactttactctgcaaagaataatgagcttgctttatctgaggcatacagcttaatgccgaggcgtaaatcccctcaggagtgacagactccatagaaactatactttcatccaaagaatctacatcaaaatactcctcacccttcaactccatcaattgcatcaagtcaagaaaagaaagccgcagcgagttcctagcttcagtagccaccagctcatcatcagccaattgagctttcacatcatataattgagactgcggaacttttccattctctatcaaaatccgtgttctgatttcttgttcttttgtcaaccggatttgttcttgagcgatacgatagatttctttattcaacagtatctgaaaataatagttagttacattgagtgacaaattgttttctatcaattccttatttgcctcagccgccaatatatcgaatttattccgggtaatggatgcacttgttttgaatccggtaaaaagaggcatttcagcactggcagagaatgaagaattttgtatgttgctatcttcatacgtattatcctgattcaaggccctgccaaaagaaaaacgttgtgaagctcctacattcaggtcgggcagaaaactgctcttcagcgtatttctctctactttcaaacttttaatccggttttgactctgcttcacctctatattgtgcagtatggcataatctatacattctttgagactccacttcttattttgtgcttgtatattcgctataaatacgatggctgcaacagctgcaactattaactttttcatactgctcattctttaacctatttcatcaaactgttccttccataaacgatgatacatcccattcgaattgaacaattcttcatgagtacctgcctcgattacttgccccttatcaatcaccacaatcttatcagcattcttcactgtactcaaccgatgagcaatcacgataatcgttttccccttccgtgccaatgcatccagcgtctgctttacatagcgttcggaaatagaatcaagcgaagacgttgcctcatcgaaaataagtatctccggttccttatacaaagcacgtgctatggcaagccgctgccgctcgccacccgacaaggatgcaccatgttcaccgatataagtccggtagtccttaggcaaaccatctataaagtccttcaaaccaagttgttccgtcaaatctacaattttcttcatgtccggatgcaagtcacctaccgctatattctctgcaatgctgccggcaaataattcaatctgttgaggtactgttcccacccggcgacgaaggctgcgattgtctatttgcgcaatatcataatcgcctatgcgaatgcgaccctcctgtataggataaatatgctgtaacaacgaaatcaaagtcgtcttgcccgacccgctttctcccactatggcagtagtcttccccttttctatcttcaagcccaattccttgaacacatccttgcgcgaaccatagcgaaacgaaacattctcaaacgtaatatcgcctaccatatccggttctaatattatcttttgattattatcctgttcgcgttccaagtccataatctggaataagcggtcggcggcaatcagtgcatcctggatagtctgattggaagaaatcagcgagccgataggagaaattacataaccaaccaaggaataaaacaccatcagagctccgggtgtcaactcctgatcgaccactaaaatacttcctaaccaaagaatggcaatcgtaatgccggtggatacaaactgaatgccgccttgcgccataatggatccataaatactgcgatacgtattctttaataaatgtacaaaacgagtttccgttttcaaattggcatattcctctataccgaatcgtttgatagtagaaatagaattaagagactccaccaattgcgcttccaaatcagcgctactttccataataccgcgctgatatttccggttcaatttattaaatccccagaaaataagcaagaataagggggcagacactaatgtaatcaatgccagctcccaggaataaacgaacataaggcacacagagaagacaagaatcatgatattaaccaccagatccaacgaaacattattgataaaattacggattttcaccgcatcattgacgcgtgaaataatttcacctacgcgcatcgtatcaaagaattgctgaggtaaagtcagcagatgcttataatatcctaaaatcaatgccgcatcaatccgttgtccggtctttaaagccagaatacttttcattgctccgataaaagtccgcaatagcaggatgaccagcatgatcactcccatgagattgagtaaattgatatttttatctaccaatacataatctgtaattttacctacatagatggaagtggataatcccaaaatgctataaataagcgcaccaaacacggcttgtagcatcacgcttttgtgaggagccagcagagaaaagaacttctttgtcataccggttttcatgtttccggtcttgaaagtttcttccggttccagcaacactaatacaccggtccacattttctcaaattcctgattggtcacgcgatgcatccgcccgtcacccggatccatatactctatgtattctttctttttctccaccttatatatcactacaaaatgctgaagctgctcgtgcacgatgacatgggcaataacaggtttaggaacaatatacaatgcctcaaacttagcccgcactcctttagctgacaagcccagcttattagcagcctctatcaaccccaaaatattcgttcctttttgatcggtaaacgcatattggcggatacgtgcaatgggaaattgcaaaccataataggcacatacggaagccagacaagccgctccgcaatctgtaatatcaaactgttttattttaatacctttcttgctcatcattgaatatttataaatgaattgtagaatcaaaatttagctatcatcgcattattctcatattgtttgggattcgcccaatcgtctatcttttggtagagcaaatcgaaaagcgatcgccgcgttatcataaaatgggcactgacggtcattcccttctttaatattcctttctgtccgcttttcagcataagatagttccgctccatttgacatttcactttatagaatgagtttccctgactgtcggttaggaagtctgatgaaatttcggtcactttgccgggtaatgttccccattcattataattaaatgattccacctgtacattgaccggcattcccaaactcataaaaccgatatttcgaggagtaacatatatttccatacacagtgtggaatccgggctgataactgccaatgactgtcctgcctgtatactgcttcccctgtatatgccggaaaattgatcaatggttccacttatcggactacgaactatatagagttctttatctttcaactcttgcttcagtgtagtattcatttcgctacgagaattacgatacgtattcagatctgcctgccacgtactcaactggctttgtatcaatgaagccagttcattttgccggctttgatattgaaaataatatttatcatattcttcttctgaaatcactttcttatcaaacaggtttttattgcgcttatactctttttctgcctgtgccaaagaggttttcagttctttttgctttttgataaaataggtatattcctgttgacgtaccggagaatgaaacctggcaggacattcgccttttgccagataagccaaatctgacaaatgtgcttcatagtcattcaggcgattcgtttgataattgattttataatcggagttattggtgcggaagcggaggagtacatcgcctttattcacttgatcgccctcgcgcacataaactgaatctattaattctgtgatagacgattttatttcagttttttcagtaatcggccttactactccactgccttgcacagagatatctacatagataaaaggcaatgcaatcatagcggcagttacggctgccaatactacccaatagataatctgggactttgtggtgtattgatagatgtatgtttcaatactgttctctatccattcatttggtaataacataacatttctacttttactgattcatgcagcaaaagtagaatgaaagaaaaagtatatgtgttatcgaattgttatctttaggttaatatctataagtttatacagaaaagattcagtgttgacatgttttcaacactgaatctttatttagaatgcactataaacaattccaatgataccattaattcttttgaaacgatatcaagcgtctttattttttctatatatcaatatgacattataaaaaagtcctattatatagataattataaatgcttacacactagttatctcaaatacaaactgtttcgttttaaaataaacaatcatcaaattcactagttgcatggaaataaatagtatgacaaaattctttgtatatagtttaattctactcattttttaatggattatacaattgatttagtggatattctttagcttatctcaatatatcacactatgcattttttgctatctcaattaacaagcgcaattattaaaataaaacattagtttcacaattgcaataccaaattactctactataagcaaaagagtacatacactccatacattgcacaggccccataaaatgctttacctattttatgtcccaattctctaccttcttcataagatcctccatcaatctgtcgaagttcgtcaaaagttaattcattcataatgataatttttaaattaatactaataaagaggggattcaactataccaacaagtaccccaataaaagaagttatattactccaattttgccttgccgtacttgagttcatataataagacattggtactccagctagaatttctttcaattcagatgatgtcaattttgatgtcattatatcattttccattttttcttcgtattataaaattaattgctactatcagtaaaataagtttgctcactatatttatagagttaaatatactttcttctatattcaaattagaattttgaaggagtaatacaaacaatacaaatactaccaaaaatccaaaaagaaaaatagtttttatcattttaactattccactattatctctacagaatttctctattattgatttgtacctcatcatttatatttttttattcatttcataaatatactgagtagtttaaatagattttctcataaactattttgattactattttttacaaattcaatatcatataaaaattatagtaatattacaatttccaaactatagtcaaaattatgtttacataaaagctaccagcagacaacatccgccaacagtccatatttctcatggagttgttccatctgttccgcagtaggaggcatacaccctcccgatacctgtacatgttcctcaccactgagtggcttcaccatgcaataatcattttttttcatacttcattttgtgttttattgttatatatgcgaatcagtagttgaaatacctacttgattcagttagttaaaatgttattattcaattaattatctcgtttatttatttctcaatctccttgaaaatcagtatattagaagaataaaaccactcattattctaattatgattcccaaggagaaagagctaaaacttataaaaatatatatgtacatctgcgatatttaccagtcttcactgaagttttactgccagagattcagtaataatgcaactcctatctttacagaccaggaactgcttaccgtatatctgttttgcggagcctatcagcgatacttccaaatcaaagagatacatacattcactgaagaatatttgctctcatggttccccaacctaccttcttatcagacattcaactatcggttaaacctgatgagtgaggccattagtgaacttgtaaagcatctcattacattctttaaaccagaggattgcgattctatgacatcacttattgactctatgcctattattacctgtgcaggaaagaataaaacaggaaaggtagctactgaaattgcaaccaaaggatactgttctacaaagaacatgtattacttcggtctcaaactccatgctttagccttccgcagggaaggaactattccattcccggaaatgattctcttatcatcggcagaagagaatgacctgacagttcttaaaagagaagccgctgatagccttataaacagaaacatctttgccgataagatatactcggatttttcttactggggcaataagcaacaagaacaaggaactactatgctaactcccgtgaaagcaataaaaggagaggaaccagttattactcaaagagagaaagctggaagagaactgttctctactgctgtttcaaaggtcagacagcctatagaagcgtttttcaactggctgaatgagaaaacaaatattcaaagagcgatgaaagtcagatcaacatctggacttttagtacatacgatgggaaaaattgccatcgcactcatttatctaattttttaaaacaagaatcagaaatcaactactgattcgcattactaataatcattctatttattgcataagacaataaggcaccaacaaaagtagcaattatatctttataatcacataatcccccttccactatcaatcccaataattcatatatcatcaatccacatgaagaatataaaagcaacttaatcggtttgtacatttcattaggagaaaaaagagaaacaagaataaaaaaaacaacacattcaccaaacagattagtgtatgtatcggcaagatagaaatcaaataaatgatttgtatatacccaaggacggtaatatgtccggaatagcagcattattatgataaagagacaacctactatcaagtgaagcaatctatgtttttttctcataattacgatatctagttgctagtcaggaaagcttataagcaatcctgactaataaattcttatttaaaattaatcatactagtatattatataattgaataacaattgatataaccacataaataatcaagataaaattgattcgcttcaattttttgttttccttttgtaaatccgtttgtttcattatctattcgtttttatccataagctgttggactattttgtgccatctgaccaaaatattctaaaaaattacaaatacttgctcctatagaacctacactattccccaaacttctcattgctttatctccaccacaaaaacatttacattcttgctcagataattcttcataaacacatttcataaaataatactttaatgattaatttcttgttccgttccatccctcattaacccccacgcaaaaatcatcccaattattgtatacataaattgcagcaccagccacagcaagagctaaagcgacccatccaccattcacttcttgcatctcattcacattcatttcctgcatcaaagcactattttctaaatttttcataatagtattttttttattagttaataaattgtatttatctaaaagcctaccagcagataatatccgctaatggtccatatattttacggagtcgttccatctgttccgcagcaggaggcatacactctcccgatacctgtacatgttcctcaccactgagtggcttcaccatgcaataatcattttttttcatacttcattttgtgttttattgttatatactaagaaaataattctctaaaatagctccaagaacattcatatacagaaactgtcatattacattaatatccgtactatttccctttatcatcttctttttttcttacactaatattaagtatcgctaccagaaaaagaaagcatacgggaatcaacttagcccggtctccctcatagagaaataaagctatagcaagtaaaaatactgatacaatatacagaatactctttttcatattcaacagaatgttgccacacctactaatgctccactgtatccacccaaagcttcacccgaaacagtccggctcctgtcaaaataccaagacctgcaccaccgaccgcaccagctacatatttagcatactgagtaattagggttgtttcgatgcgacaaatataaatctactttttcaaactctttgttatcagattattatctttagattaatgttaaatcgtcgtacaagacatatcatttatcatctaaaataatatcctccgaaaaaaagtattgctgcaacaatccatattatcagcaaagcaataaaaattctttttgtccagctatatgctttttttaaactgatgacataggaaacatctgactttctattctttttccaagcctctatactatggtataaaggaattatgcctaaaacaggacacataaaagttagcagaaccgataataaaaggactgttgatatatgttctttttccatactgattgttattttaaaatgcacaataaattgcactgcctagtactccaccaacagtacatgctccaaaaaacaaatcgccaatatcacatgctatagggtggttattctcataaaaatctttataattttggtattcatcattggcacactgataccaactagcaagacttcttgtttttactaaattttcatcatcaaattccaattttatatctttcaaggtattatcagatatatataatgttgcaaatagtacttcatcagtcgtgtagtgataaagtatataattattttcgtctatattttctttcaccaaaatagcatcaagttttatatctctattatcctctctataaacagataaataaaattgttctatatttcgacctgaggcacgagtgatataaggaacctctttgcttttcaattcataacctagtccattttgtttgatatcaataatcacagtacttttcctttctttttccatcacagattcggaattactacaactaaagaacaacaatgtaataaagcaagcgcaaaatgattttgcgattttaaatacaattcttttcatattcatatagttttctattaatgcaaatcaataggaagtactgatactgatttacattagttaataaaattgtacttatataaaaacctaccagcagataacatctgccaacagtccatatttctcatttgttccgctgtaggaggcgcataacctcccgatatctgtgcatattcctcgccactgagtggcttcaccatgcaataatcattctttttcatacttcattttgtgttttgttgttatatactaaaaaaataattctctaaaacggctgggtactacaaatacactagtcagactagtactgctactgtaaatgtagcatccaccataaatattcatacattctgctaacgtcagcgttttcatttcatttaattcttatcatgttctgtgttcgtgttattattttccctatttcaatattagggcaatctctgattcttcttttgaacaagcggacagtaaaaagtggtataccggtcatgtgatttacgtccccaccttgttcgtttatactcgttttttccatatctctctttttgggtttgttttgatgcgacaaaggtaaattgcttttttctaactctttgttattgaagtgttatctctatgttaattgtttatatatctgggtatacacttaccttcttcattcaatacataaacaactcttccttcaccaccataaatattttctttttctccttttctcaattctaaaataatattttccataacttattgttttaatttaaatgacttacatttgttttacattgcaaatatacaggctatttttataataaaatgttatccgattgttatctaacattagaaatatgttattatctttgcaaaaaaataaacatgaaaggtagacacattaaaatactcactatttttggattaatagcaattatagctttacaaactatatggttatgtaatgcatatatacagttttcacaaagtatatataaagatagtaatgacattttaaagaagtccttaaacagggaagcttctattagatttgaaaaaacacctaagggaacaatgataaatggtgctccaataaaagattctaatgaaatagtaccggaaatagcctatttgaacgaaggattattaaaactaggattagaactatcattaactaatgttgattccctcgccaatgatttcttaaaagctactaatattgaaagtacaataactatctacctactgaatactgacacagaaaaagttctgaataaaagcaagaatgatttagatatccattcattcgggattataaaaacagatataattccgatccggacagatttatcacaaggtgtgcaaatgattttaataaacccatattacacaattattaaacgtatggggttactgctaatagcaactgtcatattgatgatttttgtaataggatgtattgtatatcaaataaaaatcatcgccagacaaaataaaatagcccaactcagggaagatttttcttatgccatgattcatgatatgaaaacaccactcagttctatcacgatgtgtactagttttctgcacagtggaagactggatgacaaacctgaaatgaaagagaaatattttactatcgtagaaaatgaagcagatcatttattagcattgaccaataagatacttacattatcaaaactagaaaatcataaattggaaatgaataagaaaaaaatctcattcgaacctattattgaggatttaaaagagaagtttataacaaaatctgacaaacccattcatttcactattgatttaaaagccaaagaagtatatgttgatgaagaattttttaaagaacttatgagcaacttgatagataatgccattaaatattccaaaaagagtattgaaataaaaataagttcgcattacgatgataaatataccattataaaaatatatgataacggaatgggtatctcagagaaagatcaaagaaccattttcgacaagtttgaacgtgcttcagcaactaaacgcactaaatttggtggagctaccggatttggattaggtttaaactatgtttatcaagtaattgaagcacatgaaggaaaaatatatgtaaacagcatagaaggagattttacagaatttactttgtttatacctaaaattatggaggaactatgattaaacttttattagtagaagacgatcccactttcagttatatcgtgaaaagtggattacaggaaattattggtggttatgaagtgataactgctatgaatggaaaagaaggattgaaggcttgggaagaatatcatccggatatcattatttcggatattgacatgcctgtaatgaacggttatcaaatggtagagcgtattcgtgaaactgatggagagactcctattttatttgcttccgcattgacttctcccaaagatgtaaaagaaggatataaactaggtgttaataactatgtgaaaaagccctttgtgcctgatgaactggatgcacatatacatgccattcttaaaataaaagcaggaaccaaatcacgcaatgaaaatgaacattataaactgggacgtttcacactggatgccaaacatgccacactgtataatgatgaaactgaagaaaaaaagatgttaactgtacgcgaggcaaaaatacttcaactcttctgtaagaatataaatgaaactgtggaaagaaaagctattctaagccgtttttgggatacggaagacgattattttaaatcacgcagcctggatgtttttatcacgaaattgcggaaactgttgaaagatgaacctcgcattgaattgaaaaatatccgaggagtaggttatacattgttactgacctgaaaaagtaagatatgttcatgagcaaagtaagttaacttacttgcccctcgaagttaacttacttttttcacttaatatgaaaccgaaaccggaatacctgcctctttcaccaatcctcctattttatccaattccttatgagtagctttttccaaatcatgatcgggcgtttcgcggtcaatggtataaatcatcacttgacgcggagctatctttttcacaacctccaaccaaggtaacacataccggtctgtcgtattattcacatcctgaccttgataggtacctttcatgaacatagtctgaataatcagctttcctttgaaagctttcatgccttctataattttctgcacatcataatgtccagtaggacgatccgtcaaatggatataatccgtatcaatggtatccagtttcaatatattattatctatcttattcaatgcatcaaatacctccggtttgtgaataaaagtagagttactcaatacactcacttttgcctggggaaaatatttatcacgcagtgccaaagtatcctctataattcctgcaaagtgaggatgagccgtcggttcgccattaccggcaaaagtcagcacatccggtttaggaccattttgctgcatatcaatcaaacgggcctccaaagcttcacgaacctgctcgcgagtaggcagtttctttttcggacgatgatcttcattaaaaccacattcacaataaatgcagtcgaaggtacaaaacttgccatcttcaggaagaagattgattcctaaagaaactcccaaacgacgactatgtaccggaccgaagatgggagaaggataaatgattgttgacatagtttttttttcagttgataacagtacaaaaatacagaatgtttttcagaatttcagcctcaactgcaaataaaggtcactctttgtactgccgtcaatttcctccaaggcggaacttatcttatcccgattgaaataatgagtagttccgtacttggcctgcaagataatgtgtttattcaattcataacgggcgttcactgccacacgcatacctttataatagaatgaaggcatggaaaaagcatagagcacactcttttcatagatagtaagacgggaattatagtcatctgtgttaaaccatgcggcactcaaatcaagctgaagaggaagcaaatggaaggtataagcagcactttgagaaaccagaaaaccattggaagcagattgcccacgaaagttgatgcgtacataatccgctatggttttcaatgtcagcttatctttcacgctataattcaattggtatcggcatttctgctgaatagatggaatagtttgcttggttttatcctcagcagtgaagtccttttccttctttttataacgatatcttataaacatttccagttcataagtaggtgaataacttaattggagtaatccgtccaatcctttggttcctgctttgcttactaaatatttcttccaagggaaatagaaaaaatcaccataacaagtcattttgatatactttaaaatactggtttccaatcctatataaaatccactctcattttgtaccgtacttccctctcctatagaacgagcataaaccgattgatatttggcatcataatacctgttcataactattaactgtgttcctcctttcggtgaataacgtaacatattcatggttgcccaagtaccacatttgtctatagccgtttcacccaataaagagaagcgtttccaaaagaatttataatctcctcccacattataaaagtcctttccacggggataataaatattatagtacttcttctcaggattcaacggcttgttgaaaacattataaacagctgttaatcctaactcacagtactttccattataatttaaattactgccaaccaactgattagttaatgtatttttcttctcaaactcacgatacaaccgatgatatccatcttttttcaacgaccttataaactgattatcaacaataccatccatcttccgataagaatagaaaccatccaatgtccatcttttcgccaacttatagctgactgccattccttgaaaatagttatattcatcggtagaagaatgcttgcgtattccccggctcttatttcccaaagtagagagtgtagctgtttttcccatcccgaaatcagtgttgataactagtccataaccatagctgacacggtaattaccaagagctaaagtcttgatatgacctatattacgaattaacaagtatagtgaataaaaatcataaccttttttattttgtccggtaaagaaaggttctcctgcatccttttcagcagtaattcctgcataaatctgatcccgataatgaaaactatatcgcagattatgataatatccatatcccaaatactgtttgttcggattcttttttaaagtttctgccgggtactgttgatacccggccttcgtataaaaaggaatatcaacacgtgttgataactcttgtttaccgtatttcaatatccgctttatatttggtttatattgctctttttcaggagtttcaaagtaaataaagggtagtaaatagtgaatagtctgcctgtcaatatcttcaatcatccataactcattgcgggtaagcataggaccatatttgtacagataatacaatatattctctaccagttggtcagagagaaatggaaaacgttccagttgctctttagttgctgtattgatattgatgggattttcacgtaattcggaaagctcctcaaagtgagtatcccattgaaacgaactgttttcatcttcatccatcaattgctctaccagttcttcccatacttcctgcgcacacaggttatgcaccgacaaaagtattgtaatacagataattaacattactttcaacaacctgttcattttgtaattcattggcgtgttttaagttaaatagttttatccactatacagagtaatcatatttcttgctacttttgcaccaagatgaaaaggaaactctttatagcattgtttttttcctttatagccgttgctgctcattcccagcaacaaacgactactataaacggatacatggtacctgtatgtgtatacaaaggagatactattccagctgtacagttacctaatgtatacattttcagaccattaaaattcaaaaacgaaaaagaaagacgggaatactaccgcttggtaaggaatgtgaagaaaaccctgccattagcccgtgaaattaaccgtgctgtaatagaaacttacgaatatatagaaacattgcctgacaaaaaagccagggaaaagcatctgaaactcgtagagaagggactaaaagagcaatatacaccgattatgaagaaattaaccttttcacagggcaaactgttgataaagttagtaaaccgtcagacggattcttcctcttatgaattggtaaaagcttttatgggaccctttaaagccggattctatcaaacttttgcagcactttttggtgccagcctgaagaaagaatatcatccggaaggagaggatcgactgaccgaacgggtggtattgttagttgaaaacggacaaatctaactgattcctactgtttgaattttactcttattatctgaatttcattaatttattggcaaactcccatacaataatccctgtcgttactgatacatttaacgaatgttttgtaccatactggggaatctcgatgcatccgtcacaggcattgactacttcctgttgtacccctttcacttcatttcccattacgatggcatatttcttatcggcatccagttccagtttatccagcaaagtactgccttccacctgttcgatagccaatacggtaaacccttgatcatgaagttcctgaacggcatcaagcgtattctttttatatctccactccaccgaattctcagctcctaaagctgttttatgcatttcgggatggggaggagtggctgtaataccacataaataaatgcaatctaccaaaaatgcatccgatgtgcgaaacactgatcctatgttgtgtaaactgcgtacttcatccagcaccactgctaaaggcaacttatcggctttcttgaattcgtctacagtaagccggttcagttctgttattttgagtttcctcatactctattttctactttattattaacggttacaaacttacataaaaatctatgatctttacgcctatataatgaaaaagaagtctcccctactctctttttatttttacttcagtcccaaatccatctgttttacaattggatttctttatacaaaaaaagataataactaattcacatccccctgttgataacggttgaaaacatgtaaaaaggatgaggatatcatttcaaaagtatttcttgcatatttcaaataatggtataacatacacttaaaatcaacaatccaaaaattaatcacataacttaaacaatcaatatcaacacaatttaatcactatttcaggcgttcataaccataaagtttttaactcatattcttatcaacaatatgttaatagaataagtaaaacctgtattatcagtatttaagccggttgattatttattcatatcttggtattatatataaataacttatcaggcaagagaaagaactcttttttactaacaatataaacagcctattattaataccatatttctttttttgaaagaaggagaaaaaatatagatataatagatacaaagaaattgttggtaactgtttattgtgtttcttgaaatgtaacctgtaataatttcctgcgtctaagtaacagaaataaaaggtagaagatcgcggtctttttattaactaatgcactaagataaagaatatgataaaaagaatattggttgccacatcacttttgtgtatgtgctgcatactttttgctcaaaatgtacaggttaaaggaaaagtagtttcagaaaatgaagcggtggaatttgcgaatgtcgtattgcagacaaaggattctatatttatagccggaggagtaaccgacagtaaaggaaggttcatgatggagaatatccaagctggaagttatctgctttgtatttccggtatgggatatacctcccggattatatcattggatcatttagctgtttctaaggatttaggcgttatcatgatatctccggaatcgatcctgttaaaggaagtggtggtaacgggagccagtgtgataaatgctgccgacaggaaaattatccttcctacagcacatcagttaaaatcggccggcaatggtctgtctttattgcagcagatgaagctgagcagaatacaagtggatcaaatgcgtaacaaggtaacatcctccggtgaaggggatgtacagttacggatgaatggagtaaatgccgagatacaggatatattggttcttcgtcctgaagatgtgattcgtatagaatatcatgatgctcccggtttgcgatatggggataatacggctgctgtgattgattacattgtaagacggcatgaaaccggtggctatgtggctttggatgcgcaggattctccgcacgtactttttggaaacaataattttatggtgaaaataaaccataaaaagtcagaattcggtttgaattataataatgtttatcgttcggtagataattattggcgtaataattgggaaactttccgctatgaggatggttcttcctttacacgggtggaagatggtattccgagtagaatttccacttatgggcataatataggattgaattatagttttcaggatcaggggaaatggttctttaattccactgtacggtgggcttttaataagaacaagcagaataaccaaagcagtctgtatgttttggagaagcctgaagaaattttgatgatgaaagaacatagtacgggccggacttcccgtccgtcggtggacttgtattttcaatgtaaactgaacaatgaccagtcattgattatcaatgctgtgactacttatattgacactcaaagtgacaggagttatacggaggggaagagtgatgaaccgctgactgatatttattctaccgtatcgggaaataaatattcatttataggagagggtatttatgaaaggaaagtaaccaagaagagcagattgagtgcaggagtgaaatatcagcaaagtctggcggataatacctatggtggaaacgagtcatctgaaacaaagatgcatgaaacccatgcgacagcttatgtggaatacagtgggaaaatggatcgtttcaattattcttttggactgcaaggcagttattcccgattcaaacagaaagaggaaggatataacaggtattcgttattgccccgtttgagattggggtatcaattttcagataatgtctttgtccgttaccggggacagatttcacgtaaatcgcccggtttgtccgatatgggaaatgtgagacaattaattgactctttacaggtgagaagcggaaatccggaattaaagatattcacagtatataaaaatgagttggaggcagatttccggaaaggtttgtttagtggtaattttcatttgtcgtatcagtatcagcacaggcctatcatggaagaaaccatacgagataagaataacagttttgtccgtaccaatgccaatcagttaagttggcagaaattgaatcctgagttggaattgaaactcggtcctctgaaagatattttgactttttctttttctaccggtataaattattatgatagtcgtggtttggattatcatcatacatataccaattggtattacagggccgaagtgatggcatcttataaaagatggtccggattctttcaaatggaaaatcatcggaataatttctatggggaaacattgtcatacggagagagttttcataccttgggattgtcctatcgatacaagcgtttaaatatcgggatgatgactttgaatccatttgttgataattacagaatgggaggagaaatgttcagtaaagtggctccttctaagaattggtggtatgtgaaagagagctgccgcttgtttgtggcaaaagtatcatggaatatcagttttggacgtaagtatgaaaccatgcagaaacgtgtgaataacgaagatagcaatgcaggtacattgaagtcggggaaataaaaatcactattttgggtggtcataaccataaagtttttaactttgcatattatcaatacccatatttctttttttgaaagaaggagaaaaaatatagatataatgaataaagaggaatggttgaaaaaagggtatgttaccgaaccggtagacaaaactctggatttgaaaactgaaattgataagttgcgtaaggaaaagaatgcgcttatcctaggtcactattaccagtcgggcgaaatacaagatattgccgactttgtaggtgacagcttggcgctggcacaatgggcagctaaaacggatgcggatatcattgtgatgtgtggtgtccactttatgggtgaaacggctaagattctttgtcctgataaaaaagtgctggtgccggatttgaatgcaggctgttcgctggccgacagttgtcctgccgatgaatttgccaattttgtcaaagcgcatcccgatcatacggtgatctcgtatgtcaataccacggcggccgttaaagcggtgaccgatgtggtggttacttccaccaatgccaagcagattgtggaaagctttccggaagatgaaaagattattttcggtcccgacagaaacttgggtaattacatcaattcgattacgggacgcaatatgttgctttgggacggtgcctgccatgtacacgaacagttctccgtggaaaagatcctggaattgaagaagcagtatcccgatgctgccattctggtgcatcccgaatgtaaaggagctgtttccaagttggcggacaaggttgcttctacggcaggcttgttgaaatatgccgtagccagtgacaagaaagattttattgtggctacggaaagcggtattctgcacgagatgcgtaagcagtgtcctgaaaagaactttattcctgctcctcccgaagacagtacgtgtgcttgcaatgaatgcaacttcatgcgtctgaatacgttggaaaaattatataataccttgaaatatgaatggcccgaagtgacagtggatgaagctgtggccaaggaagcggtgaaaccgattaagaagatgctggagatctccgagaaactggggttataacctagatgaaaaaatggaagtgataaaagacttgaaaagtaaaggagaatttttttggaaaggattcatcataggatgtattatcggaataggaattgttttattaatgttactctcttgaataattttggcggaataatgattttcataatacattattccgctaaaattatttaaggaaataagagaatgatagaatgaaaataatactgtggaaaaaataacactccttttcaagaaccgtagaatgggagatttcgtatgcaattttactgctgtagtgcttggtatcatccttacctttatgggaagcgattggatagagaaacgaaatacgcaacgggatgtgaagagtgcccttctgttagtaaaagcggaattaaaggctaatagacaaactattttagacggaaagcaaaaaatagagagagaaatatgagttgttatttgtaatattatgaagcacattctttttcttttattattcaatatactttcttttgtatctcttcaatcgcaaccatcttgcgtttttactcaatatactactaaagatgggttgatacaaaagactattagttatattttacaagatcgtaaaggttttatttgggtatctacctgggatggaattaaccgttttgatggatatacatttaaaaattacaaagctcgtccgggagacctcattggttttattaataatcgtgtggattatattgcagaagatcatcaaggttttatatgggctttaagttatgatggtcatgtataccgttttgaccctaggacggagagtttctttcctttaccttatgatgactatcaggctaggcaaatctatatttctcctaccggctgtatatggattaccacagaaaaagcactgttattagtgacatatcaggatgacgatagccagattgtgatagagaatttttcggcagataaccagatttcgtctgatgaaaagataaatcagatatatgctgataaagaaaagagtgaatggatactgaccagtaatggaatttatttaataactagagattcgaaacgaatcatttctttttttacggaaaagtatcctcagaatagtgctttttataaagtgacagaaactgaagattatctttttttcagttccgaaaaaggttctatacaacgctataataaacaaacaaaggagtttactcttataaaattacctgttgattcttcggtaacttgcctgcaagtcttaggaaataaggaattagtttgtggtacgagggaagatggattttttgttgttaatgtagagaatggacaaagccgacaatataaaaggaccctttttcctcaacttccgagtgattgtataaaaagtatttatgtaagccggaatcatgaagtatggatacagcatgataaagagggaattacattatttcatcctcaaagtgggaatatagactattttaatcctgtcagtggaagagataaatcggaagctaattcagaattatttattgttgaagacaactccggtaatttatggatacatcctccaaaaggagaattgttttattataatcgttcggtaaatcagctggttccgttttccaatccggcattatcattagaaaagcacaagattgctaatcgtattactgctctttttatggacaggcaagaaaatatgtggataggttcttatgataacggattggaaaaagttacttttaatgatacctttttcaaattttatacagatcctacccgatatgaaagaaccggccagaataatgcccgggcactgttgtatgataataaaaatagactatggatagcttgtaaagataaaaccatcgctatttatgacaatagtcataatttcttaggttatcttcatttcgatggcagtgtttcgatgcagccggatacttcattgggaatggcttatgctattactcaggataagtccggtaccatttggataggtactaaaggaaatggcctgatagaagtccagcccggtcatagttcgttacattttttattgaagcaatacaaatattctgttgaagacatatatagtcttagtcataatgatatttatgcggtatgtgaagatgctgtaggaagaatatggattgcaacctttggtggtggagtgaattatatggagcagatagagggtaagactcgttttattaactatcgtaacaagctgaaaaaattccctattcctttatgttatcgtactcgggaccttgtttctgatggtaatggaagaatatggattgctacaagtaatggtctgcttgcttgcaaagaaaagttttctgatgccgaacaattggaattcgaacattatacacgtactccggaagatataaacagcttgagtaataataatataaatcgtgtttttctaactcgtgaaaaagaactctatgttttgactttcggaggagggctcaataaattggtttctttaaaagatggaaaagctcattttaatgtgtataccacattaaataatcttccgtccgaccttcttgtgacgatggtagaagataaaaaaggaaatttatggatagctatggaagaggagctttgtaaattcaatccaagtacaaaaactgtagaaaattatcctgcccactcttttcctcgatcactcaaatttaatgaaggaagaggagtttgtttgcctgaaagcggttctttattatttaataccaaacaaggagtgttatatttccagcccgattctattaataaaagtacctatgttccttctatcgtatttacaggattacaattatcaaataaaataataacacccaaggacagtacagggttgttgcaacggaatattgatgatacccgatcgttgacgtttacccatgacaacaattctttcagcattcagtttgcggcacttgatatgaaatatcccggcaatgtttcgtatgcctatagattaaaaggatttgaaaaagaatggaatgaggtaggtaagcaacgtatggctacttatacaaatgtacctaaaggaaattatgaattccagatatgttctactaacagtgatggaaggtgggcagataatatccgcagcatcgatattactgtgctaccttctttctgggagacaccttgggctattcttttatatatattggcagtagtggctatcatctggtctgttgtttatatcctgtttactttttatcggctaaagcatgaagtgtctgtagaacagaagctgtccgagttaaagcttcaattctttactaatatctctcatgaacttcgtacccctttgacactgatagcaggtcctgtagaacaattattggaggataagcatctttcttcttattatcgtactcagttgactttggttgaaagaaatgcaaaccgtatgcgtcagttggtaaatcagattcttgatcttaggaaaattcagaataataagatgaagatgagggtacagcagatcgaattagtatcttttgtatgcaggttgatggaaagttttaatggactggctgatgaacaccatatatcctttaaactggaaagttctgttgattcattgagtatctggggagatatggataaattggagaaaatacttttcaatttgttatccaatgcttttaaatatactccccaagggaaacaaataaaagtcataatccatgtagtccgtgaaaatgtatgtataggtatagaggatcaaggtataggtatttcggagaataagcaaaaaagactgttcgagagatttgaaaatcttgttgataaaaatctgtttaatagagaaagtaccggtataggactttctttggtgaaagaattggtagagatgcataaaggtacaattggtcttgaaagttgggtaggaaaaggtagtaaatttactatcttattgcctttagggaaagaacattttgattcggatacagagtttattcttacggatataataggaaatgaggctgtaggagataaagatactgccggtttattgatatcggaaaatgaagaaatatcttctcaaagtgatgtttttgattccgcgaaagaaacattgttattagtggaggataatggggaactaagatattttttgaaaaccatattcaatccttattttaatatagtagaagcagtcgatggagttgccggttttaatatggctaaagaagtggttcctgatgtcattatcagtgatgtgatgatgcctagaaaagatggaattcggatgatgcgtgaattgcgtgaagaaatgtctaccagccatatacctttagtgttattgacggcaaaatctactgttgaaaataaaatagaaggaatggaatctggagccgacgactatattactaaaccttttagtgccgcatatttaaaagctcgtatatttaatttgttggcacagcgtaaaaagttacaagcactttattgtgcaactttattaaagacctcggctgaatcatccgaagaagataaaaaagaggagggtattcctgtcttatctgccaatgataaattgtttatggatcgtttgatagagtttattgaagataatttggataacggagacttgatgattgctgatttagctcaggaattgggtatgagccgttcggttttctttaataaattgaaaacactgaccggactgtctccggttgagtttttacgtgaaatgcgtattaaaaaggcagctcagttgattttagctgatgagggtaatatggcgcaaattgcttatcaagtgggctttaatgattctcattatttcagcaaatgttttaagcaagtatatggtgtaactcctacagagtataaatcgggcaaagaaaatagaatttgacggagaagaatattttcctaaaacaaaggtatcttctttgcctttaaaaggaaagaagatacctaaaagtttaggttgcaatcattttaatgatttgctttgacaacataaaaacacatcttgtttctttttcttatttctgtttgaaaccgtaaccattggtaatgtttgaattcaaaagtacctgatatgtattgggcataagatggataggtggattttttgctgcatagtctgcatcggtataacctgcaaaaagtttggttgcataagaatcctcatagttcaacatatcaatagcccatggagtttttacatatccgtcggcctctaaagcttttgcttcgtcgcttgaagggtcaatatatgtaaataagccttttatggctacattagtcatgttttcattagcataagcaggtacgatacttccccaatcatcatgctgtcctctccatccgggaaaaagaacagggtcgttttctttacctgcaggagtctgtgttgtcagacgatatccgtattcttttttagcatctaccattttggtccatatataggcagggagttggtttccattatcgaaagtataatatccgttatttcggataccggtgatgattgcagtcatcactttacggttttcaacggctacttcaggaagaattccggtgcggataatatcaaagcgacgcataccttctccactgaattctaatgcacgttctttaataacggcattaaatacggaaccgcaatcggtgatatatttttcaaaattaggatcgttgtttcctggaaatgcacgatggtgtactatgcctaaatatgttttagctttaccatcatctcccaatgcagcatatacctcggcaagcattaaatatacatctgaaatgcgcatataggaaatattaattcctgatgtgccataggactgggtattaggactaggaagacggttccagtcatacttattagttccgggaccactgcctttcccccatgcgctgcgatcaaaagactggattagttcttgtccttgccctgtgcttccggtaacggttactgatacatcgcgtctcatgtctttgttgtcaaaccaaccgtaataaaaatgtgcctgaatgcgatcctggccacaagctacacaaggagcttgtccatttcctccggtagaaggacggcctatataggcaggacggtcggaactataattatactcttgaggtatttcatataccgattcgtcagctaatgttacattatctcctgcatgcatctgttggaagatatattgatatggattaccatattcctgtccgtttgctcctttggtacggggatcaactgtgtgtagcactattgaaccgggattgttaacacattcttgaagatatttttcggcgatggcatatagttttttccaatcgctgcgacgtccgtaaattgcgttattcttttccacactccaatcatcaaaagtcagtgtattaccttctccgtctacatggaaatctgcaccgagatctgtacgacgggtagcatagcctccgttataaaggcagatacgaccaatgagaccttgaacataattccggttcataacatctgcacggtttcctccttcacctgcacgatacatgtgaggttcgacttcaatcagtttttgcacatgataatcatagatagcgtaacgtgatactaggccttccgctttttcacctgctttcagtacatgaggtacatctccataccaacggcatagttcccaataacaagtagcgcgtaaagctactgcttgtccatatacatctgaaagattattaggttcacctgtcataatttcattgaaattgtccaaagattcgaaacttgaaattaatgaattggttattgagattgtttcataaagtttggtgaatacttctgtaccttcacctgtatcaatattataattgcttgttcctccgggataaaaccatttctgaagaatacctgcactaccttcattataagtatcttgggaatcttcaatatccgaaccccataccggatgccaaaagaatcctgtggagtgcaagctgcgattggctctaagggtttcgtaaccatagtataaggcatcacgtgcagaatcctcattagagaagacaaaatctcggtcaacgacactggaagaagaggtgtctaggaaatcgttacaacctgatagtgtaaatgcaaaagctgttgcaagggctatattcagtatttttttcatatcaattgttctattttagttataagatttttatttagaaagtaatattaccacctaaagtaaaagtgcgtgcacgagggtatgtaccaaaatccatattgagagtagggaaaactcttagattactataaaatccactttgtcctgtaggagttgcattaacttccggatcaatacccgaataacctgtaatagtaaacagattggtcgctgtaagataaatacgaagcttctcaatatgtattttgttcaaaacggtatgaggtaatgtgtaacctaaagtcagtgtttgtaaacgtaagtaagacccgtcttccagccattcagaagaagtgattccgctttgatggtatggcaggtgatatttggcgttagcattcaaggcattcaattcgttgggatcggttacggcatacaaatcacctgatgagtttacattatatactttatatgtatctgctacccatgaagtacgttgggctccgataccgtcaaattcttgccctgaagcattaatcatggctgcaacgttatatacttttcctccggcagtccaattgaaattactggaaagatcaaagtttttatagttgaaatttaattggaaactccctgtatggcgtggcattacttcgccaaggcaagtggcatcatccagatctacagtgccgctgttgtttacatcacggaatttggccgctcccggaaacgcagtttgtccattaggaatattgaatggatgcatataggtagctgtaagcgctttagtaatatcgggtattccttcttttagaatgtattggccgttctcataacggaaatcgtttactgtgtaaaagccttcgctgacaaagcctctgactaaaccgattgcttttccttctacaaacatatagtcattggtaggaacaagggaagatgaaccccaataagaagaataaaggtattgatcagcattaggcagttcatccagtttatttcgattgtagttataaatagcacctatgttgaagcggaaatctcctttatttatcacatcaaaattcagtgatagctcaatgcctcggttagatgttttaccaaagttctggaattggtaagaataacctgtggtgttgtcgacaggtactgccattaataaatctttagtggtattccagtatatttcaagactgccattgatccggttatttagaaaaccgaaatccaaaccaagattgcgtgagatggttgtttcccatttcaagtcggaatttgccaataacccgtctggacgatagaaagagcctaattcaccatttataggagtgtggttgctgcttgagcttagactggaccaagtttcacgccataagttggaattgatgttgtcactacctgatgtaccgtatgataaacggacttttaaatttgataaccagtcttttgctactgccataaaaggctcttcagacagacgccatgcaaaagcacctgctggaaaatacccccaacgattattcggagcaaatttggaagaaccgtcagcgcggaaagttccggtaaacaaatatcgatcattcaatgtataactgagacgtccgaagaaggaggctgtacgtccgggaacactgaaattattgttcgcggaaagagaagtggttgcagtatggattaatcccatggtagtatcataatcaaaggtatcgggataaccacgacctgaaatttgagaagattctgaatcggattttagaatttcattgccgagaagtgcagaaaaagtatggttcttgccaatattgaaattataattcagtgtggttacggaacgtaatccgtcgcttataccacgggtcaaggtagcacgtttgtctccattggtatatccgttttcataatccttaattccgcaacactattacaaatataactttttaagtacctgagcaacaaaaagttgctcaggaatttgccatgtcagatttttcacctatcttagtgttgcaaatcaaaatatgtatcaaacccgacagacatggcaaaggtagcaattaaatccgagaaactcactccttttggaggaatattttcaataatggagcaatttgactccagactctcatctgtaatcgactcaaccctcggtatgagatgcaggctgtatggttatcaatacagcgaaatcatccgttcgcttatgagcgtttatttttgtggcggctcatgcatcgaggatgtcaccactcatctgatgtaccacctttcgcttcatccgacacttcgcacatgcagtgccgacacgattcttagagccataaaggaactgacccaggataacatttcctacacatccgacactggcaagacctacgacttcaacacggcagacaagctgaatacactgctcctcaattgcctattgtccacagggcagctgaaagagggcgaggggtatgacgttgacttcgaccaccagttcatagaggctgagaagtttgatgcgaagcctacatacaagaagttccttggttatcgccctggcgtggcggttattggcaacttgattgtcggcattgagaacagcgacggcaacacaaatgtccgtttccaccagaaggacacgctgaagaggttctttgaaaggtttgaacaaaacaagcttattatcaaccgtttcagagctgattgcggctcgtgttctgaagagatagtggaagagattgctaaacactgcaagaccttctatatccgtgctaaccgatgcagttcgctctacaatgacatctttgccctcagaggttggaagaaagtggaattgggcggcattgagtttgagctggcctccattctcatcgagaaatggaaagggaaggcataccgtcttgtgattcaaagacagaagcggatagacggcgaactcgacctgtgggaaggagaatacacctaccgctgcatccttacaaatgactacgagtcttccgagaaagagattgtcgaattctataacctccgtggagggaaggaacgcatcttcgatgatatgaataacggattcggctggaacaggcttccaaaatcctttatgggagaaaacacggtgtttcttctgcttatggcactcatacgcaacttctataaattcatcatggcgaggcttgacgtgaagaggttcggactcaaagcaacaagccgcatcaagacgtttgtctttaagttcatctctgtgccagccaaatgggtcaggacatcaaggaagtatgtgctgaatatctattcatgcaacaatgcttatgccaatgtgttccagaatgactttggataacaccgacaacttatagtcgtgattttgcgtattgcctcaagtcgcatggtggggtaaggggcatttatatgtctttatggtgacattcgatgcactgtgccccctttttactaacgatgcagattcttttcgcttctgtatcatattaggcgcgtagttgcggatttgaggataatatgaattttttgatgaaccacgggttatggatatctctgtacgggcggtaagtccgttgattatttcccaagataaagcagctgagcctcttaatgaacgggaataagatttgttagtaatgtcattaataagttctatagggttgtgtttgtcatcaatgtttgccacaccaaaactgaatcctgatgcaacttccgaatagctgactcctcctaacggattatcaatagggcgatagcggtaggcaccggatacatttgatcctttaccattggttacattctcacgtccgttgaggttattttccgtatagcggacatccatgtcgaactttaactttttggtcagttgttgttgaattttaaaagaagcgttcatacgattataatccgagttgattttaataccttcatcatccacatagccgaaagtgaataaaactttagttttctcagtacctcctgaaatattaatattatgactatgagacattgctgtgcgtaatacatcatcagtgtagtcatgtgctgaaatattagcataatcagtataatgattgccatatttgcttcccaaaccgaagtatttttcaaccgcatcttggttggcacttcctcgtgaggcagcatagctccagttatgaagaatatattcttgagccgaaagcgtttcaagtgttttagatacgttttttatttgtacatatccatcgtatgatacttttacgcgtccttcttgggcacttttagtagtgattaaaataacgccgtttgcaccacgtgcaccatagatcgctgtagaggaagcatctttcagtacatcaatggattcgatatctgccactgggatgtcgtcaatgctgcttaccgggaatccatctactacataaagaggttcattggattgtgtgatggaacctccaccgcgtacacgtacagagattgtagcacccggacgtccatcctgtgaaatcacatttacacccggaagtcgtccttgcaatgcttgggccacattggatacaggattggcagctacttgttcgccttttactgaagcgatggcaccagttaggtcacgacgtttcacagtaccataaccaattactacgacttcgtccaatgcttgtgtatcttctttcaatatgacgtttatttttgagttcttaccgactgtaacctcataagggatatagcctatgtacgaaaataccagtacggttttatctgatgggacagataaccggtaactgccgtctatgtcggtaatggttccggtagcttcgtttccttttaccattacgttcacaccaatcaatggttcctgtttgttgtcagttaccacacctgttatgattctgttttgcgcataggcacattgtgctatgaacagaatcaaaacaaaacagatacttctgattctaagatgaatgttgttttccatattactacatttaaattaatgattaagacttatcagtcaggatatattagatattgtgtttttccttgtttgattgcaaaagagtaaatttctactttattggcggtgaaataattgcttgaatgggttaaaaaaatgcttttttatattggattccagccatcttccccacctaatattgtttgaatagcataatgacttatatttttcagttgatgggaataagaaacgcgtttgtctttacaggctccttctccaacattctggtattctgcataaaatactgttttttcattttctttgttatcccaattattccaccctgcaggattaatatgtctacctaggtcacaatgaataaacacagcttgtgcataaggacgccaaggacgggaaagatatacatcactcacatttgtatctgcggtcagtctacaattaagaaaaacatatccgtattttttttcggaaggggtggaaggggcggtaatgaacccattgcttttactgtgtatatgacagcgatgaaatacagcagtggaggctccgaatataaaatctacagttccttctatgtagcattcttcataatattgtctactgtcggctccccaggtataaagtgtatcttggaatcccaaaaaacgacattttttaaaatgagtacggtcacctacgactaagcaggctacggcttgtcccacaggaccggaagtattttggaatgtgatattctccacatagaaatcaggagcgtataaataaacggatgaagaaccggacgtacctttagtttcgccgaaaacattcagtttgtttgaatagtcatcgtatgaaataaccgctccgtcttctcctattagtgcgatatttgttttgctggcggggactacaagtttctctttgtatatgcccttacttaataatattctagtttgtttctttcggaagtcgggtacggcatttattgcttcttgtatagttgtgaagttgcctttaccgtttgaagatactacataatcataggttgcgggttgttgtgcaaatgtagtttttgttatgcctgcccataagcagataaataatagataaaattgttttttgaatttcatattttctcttgttaactgtttatggtacaatattagaagaaatatgaaatatgggagtgaaaaaaatgctttattcggtggaaaattcgtttggaggtgtggaatgggattgaaagtgaaatatataaatgcaaaacgggtgtgtgtcaaaactaaaatggtctatcattttgtcatcctgaactctagtgaaggatctgtttacatctacttatgtttacagattcttcgcttcgctctgaatgacagactaagtgatagcgctatcggagttttgacacatccccgttttgctattgttctttatataagattatgccttcaagaaccggcaaagcttctccaccgccagcgcccgatgactgattttatttttcgtctcgtttcccatctcggcaaaagttttagtatatccttcgggcacaaagatagggtcgtatccgaaacctgacgaacctcgtttttctttgataatctcaccttttacaattccttcgaacaaatgcttctttccatccagaatcaggcagatagctgtgcggaattgtgcttttctattttgcactccctgcatattctgcaataatttttgcatattggcttccgcattgtgtccttcgcttccggcataacgggcggaataaacacccggcgcaccattcaaagcttccacttccaggcctgtatcgtcggcaaaacagtctaaaccgtagtttttataaatatactccgctttcagcatcgcgttgccttccaacgtatcagcagtttcggggatatcaacatggcaatggatatctttcaaactcaataattcaactttttctcctagaatggaggatatttcatccagtttatgagcattgtttgtagcaaatactaatttctttttcattttatatcatattaattgaatgcaaagatactgagaatgaaccaaagtaagataattcctgacagaataatataggtgaaaaggtaaatagtaatttgtttgctatgtgtattttcaatttttgattatcttcgttggtatcatttgatacttgatagtatggtatatatagaaacgcctcatttgttgttacgggactggaaggaggaagatattcttccgtttgtccgcatgaacagtgataaagaagtaatggaattctttatcactactttgacacaggaagagacgatggctttttattgtcgtatccggaaagaatttgaagaatatggttatggtttgtatgctgtagaatgtaaaaaaactcggaattttctaggctatgtaggttttcataatattgctttcgaatcggatttcactcccggagtggaaataggatggcggttgtgccgggatgtatggggaaagggatatgccacagaagccgcctctgcctgtctggattatgcgagtgataatttaccttttaaaacggtatattcattcactgccatacccaataaacgttctgcacgggtcatgcagaaaataggaatgcattttgaaaaagagttcgatcatcctttggtggaacaagagcattggctatgcagacatgtattgtataaaatagaaatttgagagaataggataaccgatatgtggtaatcttatcattgcttcatcgttctgtttttcaatgcagaaacagaacgatgaagcaatggtaagagattattttttagttactttatttttagtttgtcgaacccttctccatacactcctaccacattactttgtgatataaatgcattggggtcaatatctttcaccaatcggaatatatccagtgactggctttttttggctaataccactacgactttgattccttgtttgctataccatcctgtaccatctaatagggtaactccacggtctatttgtttggtgattccttcggctatttcatcatgtttgcgcgagaaaataaggaactgtacagattggcgtgaactgtttattacataatcaatcacaatgctcatgataaacaatacgcagaaaccaaacaacactcgtttccaatcatggaatatgaaataacaggaggatatgatgacaatatcacaatacatcatcatgcggccaagggttacatctttgtatttattgataatccaagcaatgatatccgtaccaccggtacttccattattgcagaaaacaatgccgataccaaatcccagtaagccggcacctactacacaagccatgaattcttgtcctggtcctaataattgcggtagtgttccatccggacctttcaacaatgtttgaaagagccataacagaaatgtcagcataaagatggcataaatggtcttcagactgaatttaggtcctaatattttcaatgcgaatcctagaaaaacagcattgatgatgaaataagacacttgaatctctattcccgtagcataataaataattgccgcgataccggttactccgcctgtagttatttgataaggcagtaagaaagccgcccatcccagtgcatagcaaatcagtccgaaggtaatggctaaatagtcttttacctctctgcctagtttgatttttaatatttggtccatggtaatgaggattgtttttaatataaagtagaaaggtgtgtcaaaagttactgcttttgacacacctcaagtatagtatcgattataatacgatatttacaattttcttcggaacgatgattacctttttcggggttttgccttcaatccatttctgggcttgttcatttgccataactgttgcctgaatggtattgttatcggcatcagtagcgaactccatggtgaagcgtgctttaccattgaaagagatagtgtattttacagtgtcttcttttaggtaatcttcattgaatgcaggccattgtgcatcgcatacgctggtggtatttcccaaagcttcccaaagttcttctgcataatgtggagcgaacggggctaacaggatgatgagattgctcaatacctctttattgcggcatttcaatgaagtcagttcgtttacacaaatcataaatgcactgatagaagtgttgtaagagaaagtttcaatatctccggttacctttttaatcagcttatgaattgctttcaactcttctttagtcggttcactttctacaggcaagaattcgtctgtgcggctataaaacagattccacagttttttcaagaaacggtgaacaccatcgataccattagtatcccaaggcttggactgttctaccggaccgaggaacatttcgtacatacgcagcgtatcggcaccgtatttttcgacaatcatatccggattgactacgttgtacatggatttactcattttctctactgcccaaccacagatatattttccatcttctaggataaactcagcgttgttatattcaggacgccatgctttgaaggcttcggtatccagaatatcattggatacaatattcacatccacatgcaatggagtggtttcgtactggtctttcaggttcagtgacacaaatgtattggtatctttgatacgatatacaaaattgcttcgtccctgaatcattccttgatttaccaatttctggaatggttcttccttgatgcttacgcctaggtcatgcaggaacttattccaaaaacgagaataaatcaaatggccggtagcatgttctgtaccacctacatagaggtctacattctgccagtagtgatctgccttttctgataccagtgcttggttgttatgtgggtccatatagcgcagatagtatgcggatgaaccggcaaagcccggcatggtattcagttcaagtgggaatacatggacatggtcaattaacgtattttccactacttcgcctttttctacatcccaagcccacttggtggcatgtcccaatggaggttcgcctgtttcagtcggcaggaatttagccacttcgggaagttcaagtggcaatttagaggaatcaatcatataaggcataccatctttgtaatatacggggaacggttcgccccaataacgctggcgtgagaagatggcgtcacgaagacgatagttcactttcacacgtcccaggttgtgggctttcacatattctttggtagctgcgatagcttctttgatggtcagtccgttcaaagaaaggtcacagtaaggagtgacatccttgcggggtgagttgcaaacaataccttctttggcatcgaaactttcttcacttacatcacaaccttctaccaacggaacgataggcaggttgaaatgctttgcaaaagcgtagtcacggctgtcgtgagcaggaaccgccatgatagcacctgtaccataacctgccaatacataatcgctgatccatacgggaacagcatcgccggtaaacggattgacagcgtatgagccactaaatacaccggtcacacggcggtcggcgatacgttcacgttctgtacgtttcttggtacggtctagataggcttctacttctgctttctgtgcttcggtggtaagttggggaaccagttcactttccggagccaataccatgaaggttacgccgaacatggtatctgcacgggtagtaaagatggtgaattcaatatcgctgtctttcactttgaattgtacttccgtaccttccgagcgtccgatccagttacgttgtgtttccttcagtgaatcagtccagtccacggtgtctagcccgttcagcagccgctgtgcataagctgaaacacgtaaacaccactgacgcatctttttctgtaccacagggaaacctccacgttctgaaactccgtctactacttcatcattggcaagaacagttcccaattgcggacaccagttcaccattgtttcgcccagataagcgatacggtagttcatcaggatttcctgtttttctttttcgcttttggcattccattcttcagcggtgaaatgtagttcttcgctacaagcggcgtttaattcttcgttgccatatttagaaaatgcttccgccagttcgctgatgggacgtgcctgctgtttgtcattgcaataatagctattgaacatctgctggaaagcccattgagtccaatggtaataaccgggctcacaagtacgtacttcacggtcccaatcaaaagagaaaccgattttatccaactgttcacggtagcggttgatattgttcacagtggtgatggcagggtgttgtccggtctggatagcatattgttctgcaggaagtccgtatgcgtcatatcccatcgggttcagcacgttgaaaccttgcaaacgtttataacgggcataaatatcactagcaatgtatcctagcgggtgtcctacgtgtaagcctgctcccgatggataggggaacatgtttaatacgtagaatttctttttgctttcgtcttcggttacttgataggtatggttctctacccatctttgttgccatttcttttcaatctctctgaaattgtattccatgatctatttttgttatttaatatctttgttattaagtggttgcaaagataatgaaagtcgtggagatatatggaaagaacagaaaataaaaaacttttttatcatgtatatatatttgtttttatttacatttttgggagtagtacacattaggtatacaccttacaaaatttattgtatttatttatacaaatagcagttgtaagatatacgatgataagattgtaagatttataatctttcgaggataagattatagaacttacaagtatattatttagatatttaaggtataggtgtattatttttcctgtttcaatacgaattccttgctaaaatcatctaccaaacaattaatttccataactttgtttccatcaatacatctaatagctatgaagtactttttcctcttcttacttttatttttaggtaaatactctgtttgtgcgcagcatatgatatctaagcagcttccttttttctatcaactttcgtccaatgagatttttgatatctatcaggataaagaaggatatttgtggataggaaccactaatgggctggcacggtatgatggttttcgtttgcagcctttccgggctgattataagaacctgaatttgctcactaataactcaatttcaaatataatggataatgatcactatgtgtggatcggtacgtggaaaggattaaatctttatgataaacaaacctgtaaaataactccttttccggatgcgagattgttggataaggggattaattatatggcagcagataaagaagacaatatttggataggagccggtaatacaatatacagatgtaattctacggcttctattgtgaaggaatatgatattttcggctcacaacagaataggcatgccattaattttgtttatcaggatagagagggaaatatgtgggcgcttacgggaggaggcttgttcagatatgatgaaaaggcagattcttttgttacttatcctccattaggcaagaataatgcaccttatactatgtgtcaagaccaatcgggcaattattggattggtacgtggggtgaaggactatggcagttctttccaaagaaagaaggggaagaatgttataaaaggcatcatattatcaattccagaagtggggaaacggaaccgatcttttatagtatgacgcaagataatacattcggctacttgtggctattgtcttataatgaactttacgccttgcaatataccgaagagggtacattggtatctgtggatatacatgatttggtagatacacacatgatgtacactaaaatcatgaaagacagagaagggaatctgtggctggggtcttatgatatggcatatactattttctttgataattcgaagattgataattatcctttgccgcaacttaaaaaacacatgggttgggatgcgaatatcttgaatctttgcttggataaaaatgatgtaatgtgggtcaatcaggatagatacgggctttgcctgtatgatttgtcacaagatctatttgcagataatagtggtaataatttgtcaaatccgggcgaagtaagcattattgtgaaatccaagcttaaggaaggagtatggatcagtcccagatatggtgcacgggtaatgagaatgactcatcagggtatgaagatacagttggaagaggatattgatttggaaaaacaaatctataatccgggaaatatcagggacttggttgaagataataaaggtagtttatggatttttagccagtcggggctttatgtaaagcgtcctgataattctattttacttgcagcaagttctgattttccagagatgtcttccttgacaagtgatagggaaggtaacatatggggagtgtctactgataaaaaggtgtacaggttaagctgtattgataggaatatatcttatgaattaaaagcttgtattccagttctttcaggacaggaaaatgtaaatcatgcctgtatagatagggagggttgcttatggttggtttcttctttagggagaatattcaaatcggatacgaataaagaggcatttgaaaatatggctttggataatcagatagatgattgctctgtgttggggttacttgctgatgaaaacaatgtgtggattataactaacaaaaaggtgcttcaatataatatttatcagaaggtatgtatgaattatgccacttcggatgggaatatatgggttgatgtattcaggtatagagcgataagcagggacagacaaggagggctgtatgtaggtgggcatcgtggttttatacatattcagtctggtagtgtctcattggcggataaaatacagttttctcctgtcgttacggatgtaaaaattgaaaataaaagtatattctttgctgaagatgaatcacttcataccatcaaccggatttctttggcccccaattccagaaatatagaaatatttttttcatcgcttatctattcattgaattccaaggtagagatggcttataaattggatggagtagataaggattgggtatatctgtcctatgataagaattctgctttttataatcagttaaagaaaggtacttattcattctggttaaaatggaaatatggacaaggaaaatggacggaaggcaaagttgtattggctattgtccagactccggctttttatgaaacttggttggcatatatggtttaccttgttttgattgtacttgctgtctatctgtcttttcatacttatgcgcagcgtattaaaatcaaaaatgaagtgaaactaaaagaagagctggcacggacaaaattgaactattttacaaatatctctcatgaattactaactccgctgacagtcatttcttgtattactgaccatttggaacaaaaagttcctgctatccgacaacagtctgtaatactgaaatccaatgccgacaaactgaaacggttaatacagcagattttggactttagaaagatggatgtgggaaaaatgaatctgaatgtgtccgaaggaaatatcagtgagtttatacagaatatttgcaagacgaattttcttcctcttgctcaaaagaaaggcataattttagagattgacgtagaaccattggaaattaaaggttatctggattttgataagttagacaaaataatatataacctgttatcgaatgccgtaaaatacactcccgaatataaatgtatcaaagtaaacgtataccttataaataaggaaggaaataaggtcttggttatcaaaataaaggatgagggaataggtatctcacctaaagaaatcaatcatatttttactcatttttatagtagtaagaaacaggtgggaatagaatcaaacggtatcgggctttctttgacgaaagagctggtgaatcttcatcatggaactatcacagtagacagtgaattaggtaaaggaacctgttttacggtagaacttcccattgacagaacggggtataagcatgatgaaatagtggatgagatggaaggtgtggcaatggatatcaccgaatgtgcaattgtagcagaagatgacgtttcatccgatggagctacggataaatctacccttctgttgatagatgataatgcagaattactctatatcatgaaagagatgtttaaggaaaagtatagtgtatggactgcggcagacggacagcaagcttgggataaattaagcaatcatgaagtggatatgattatttgtgatgtaatgttgcctgatatcaatggttgggagctttgcactcgtattaagtcggatttgcgttttaatcatattccggtggtcatacttactgcgaagaacggcattgatgaccggatagccagttatgatgccggagcggatggttatattgcaaagccatttgaaatgaaagtactttttgcccgtgtggataatcttatcagatcgtttaagatgcgtcaggcggcttttcgtaaagaagaagacgtcaatttggaaactttagcttatccgtctgccgacaagttgtttctgcagtctataattgaaagcatagaacaacatctggaagagtctgaatttgatttggaaagactttccgaagaaatgaacatgtccaaatctactttataccgtaaaataaaatctatgaccggattgacacctttggactttgtacgcaatataaagatgaagcgtgcctgtatgatgttgcttgcgcgtactcagaccatatctgaagtggcatacgctgtaggtttcagtaatcctaagtattttacgaaatgttttaaagaggaatttggcgtgacgcctaccgagtatcagcagtcacatatcaaggcctgataaaagaaagaggggataaatttctgtcattagggtattgaaacgtttcatgaaaggattttataccttctgtaaagggtttcaataccctatttttccaggatatggcttcttttgtttcatgattcttaaataataaagcatgaagaaaaagaagttaccattagtctgttgggatagtatcaaattactaactgcacttttcctgttatggggagtttgtttcggagcagatgcgtatccgggaagtgaatatcgaaaacaactttttgattatgattggaaattcaagttgggggattatcctgacgcttcattgaatacatacgatgatgctgattggaggatacttgatttacctcatgactggagtatagaaggaacccttgatccggaaaatccgatggggaatgatggaggttattttccggcagggacgggatggtatcgtaagtcatttgaaataccttctaagcataaaggcaagaaagtgggtatttactttgaaggagtttatatgaattcagaggtctttattaatggaaaatccgtaggaatccgtccttatggatattcatccttttattatgatctgactccttatctacgttatgatgataagaatattattgctgtacgagtggataattcgcagcagaaaaattgtcgctggtacaccggtacaggtatctatcggcatgtgtggctgacagcgatgaatgctgttcatatagagcattgggggatagctataactactcctgaggtaagtgaggagagagctgttgtacaaataaaaactattttgagaaatgaaacttcttctgacagacagattaccttgacaacaaagttgactaaaggaaatgatgaagccggaaaaggagaaataaaagtggatttgcctgccaatggaataaaggaaataacacaaaaaatttttgtgttgtatcctgctttgtggagtcctgagacccctcatttatataatgcacactttctagtgactgaagcgagtgatgtaatagatagtacaacggaatcttttggtattcggacggttacttattcggctgaacaaggattattcttgaatggcaagagaattattttaaatggtggatgtttacatcatgacaacggttgtctgggggcagcggcttatgatcgtgccgaagaacggaaagtagaattaatgaaggctgcgggatttaatgcggtacgtacttcgcataatattccttcagaagagttcctccatgcctgtgatcgtctcggattattggttatagatgaaacctttgacggttggcgtgacagtaagaatcaatatgactattctattctttttgatcaatggtggcaacgggatatcgaatccatggttcttcgtgaccgcaatcatccttctattttttgttggagtattggcaatgaagtaattgagcgtaaaaaattggaagtggtcactacagctcggaagttggccgactatgtacataagtttgatcccagtcgtccggtaacttctgctttagctgcttgggataatgactgggaaatatatgatccattggctgccgtacatgaaatagtgggctataattatttgctgcatcgagcgccggttgatcatcagcgtgtaccttcccgtgtcattatgcaaaccgaatcttatccacgagatgcttttgccaattggtcgttggtaaatggtcatgattatattattggtgattttgtttggacggctattgattatttaggtgaatcgggtatcgggcgattttattatgcaggtgagtcggaaggtgaacactatcaacgtaaccattatccttggcatggggcctattgtggagatattgatttgacaggttggaggaaacctatatcacattatcgtgacttgttgtataatcctgataagaaactttacttggctgtaaaagagccggataattattatggtaaggtgaaggaaaccttatggtctgtctggcctacttgggaaagctggaattggccgggacatgaaggaaaagaaatagaggtggagatttattcccgatatcccaaagtacgtctgtatttgaatgataagctgataggcgagaaattcacagggaaggaacagcaattcaaagcagtctttcctgtttcatacgagccaggaatattgaaggcggtaggtgtggaatccgagatagaaatagagaaaacgatcttacagactgccggaaaacctgtgaaaattcaattaacggccgatcgtacaaaaataaaggcaaatggtcaggatttgagttttatcacagtagaaatattagataaggaaggcattctggagccgaatgctgataatcaattaacttttgaagtgaaaggggcaggtactatagtggctgtgggaaatgctgatttgaaagacacggatagctatatcggttatcagcggaaagcatggaaagggcgtgctatagtggtagtaaaaagtacacggaaagaaggtaagataatgttgaaagtgacttctcccggattggttccggctactgtatccattcgtacaagtaaataataataacctttgtttaattctaaatataatagtatgaaaacatttcgttttgttttattgctgtttttggtattgagtatatccaatacagcttgggcgcaaaaccagactgtaaaaggtagggtgatggactctaaattaaaagaacctcttatgggggtttctattttggaaataggtacttcaaatggtactgtaactgatttggatggtaactttacgctttctgttcctaaaggagttgtattgcgtatttcttatgtgggatatttagttcaggaagttccgataaatggaaaaacatatctggatatatttttgaaggaagatactgaattattagatgaggtggtgattgtggggtatggggcccaaaagaaagctacattatccggctctgtaacgagtgtaggtggtgagaagctggcaaaaactccagtgacgaatgtatcacaaggattagccggacgtttaccgggcgtggtcgctgtttccaacacttcagaaccaggatatgatggtgctactattactgttcgtggggttaatacctttggaaaagctgatccgttagtagttgttgatggagtacccggacgttctttggagcgtattgatccaagtactattgaaacgatgtctgtattaaaagatgcttcagcagctatttatggtgctcaagctgccaatggagttattttgattacaacaaaacgaggaaaagcaggcaagccgagagtaggttttacttataattatggaatagctgctcctactgtaataccggaaatgaccaatgctgtggaatatgctactttgatgaatgaaatagataagtatgccggtaataagggccgctatacggtagatgatcttagattatatgctgatggttccgatccttggggacatccggatacggactggtttaatgaaacattgaaatcatggtctccacaaacttatgccaatgctactattgatggtggtacagagaatgtgaaatattttgttagcgtatcagccaaaggacaagatgcattttatcgtcatagtgggtcaaattaccatcagtatgacttgaagatgaatcttgatatgaaaattaataaatatgttgatacttatgtcaatgtaacaggaagaatggaagatcggaaatatccaacccgttctgcagagaatattttccgtatgctgatgcgatctaaacctaattcaccggcttattggcctgacggccgtccgggacccgacattgaatttggtgataatccggtagttatatgtaccaatcaaactggttatgaacgtgataagcgttatgtgttaaatggggatttcggagttaatatcaaggtgccttatgtggagggattgactttgaaggctactgcgtcacttgataagacgttccgttttcgtaaaatatggcaaaaaccttggtatttgtattcatgggatgggacttcgatggatgaaaatggccagcccctattggtggaaggaaagaaagggtttagtgatcctcgtctgacagaatcaatggaagataatttgggggtattattgagtggtatcgctagttatagccatacatttgctcaagatcatgatgtaaatattctagcaggtgtagaacgtatcacggataagggggattcatttgaagcttatcgtcgttattttctttctgccgctattgaccagctttttgctggtggtcaggatgaaatgaataatacaggtacagggtatgaggaagcccgtttaaattattttggtcgtgtgaactatgcttataagtctaaatatttggcagagtttgtttggcgttatcaaggttcctatatttttgatcgttctaataaattcggattctttccaggtatttcattaggatatgtaatatctgaagaagattttttcaaaaagaaattgccctttattagttttgccaaagtacgggcatcatggggacagacaggaaatgatttgattgatccttatcagtatttggcttcctatactttcaatgatttgatgtatttgactaataatggtacaacgatgaaccaagcattgaaagaaggagtagctcctaatcaaaatgtgacttgggaaacagctacacaaaagaatataggtcttgatttacaatttttgaatggagatttggcatttactattgactatttttataataaacgcagtgatattttatggaaacgaaatgcttctgttccgggcacttccggattggtacttcctgatgaaaacttagggaaagtacaaaatcaaggggtagatttcaatattgattatcgtagaagtttcaaagattttcggttgggtataaacttgaatggggtttatgctaaaaataaaattcttttttgggatgaggcacctggtactccagaatggcagaagtccacaggcaaacctatcgattcgggactttattatgaagctatcggcatatttaaagatcaagcagctgtagatgcgtatcctcattgggccggtgcacgtccgggggatattattttcaaagatgtaaatggggacaatgtgatagatggcaatgatcgtgttcgtaatgataagagtcgtactccacgatttacaggtggattgaatgtagatttaggatataaggattttgacctttcatttttactacaaggtgctatgggaggagttttttatcaaacgacagagtcgggggattttgccaatttcttaaaaagtttttatgataatcgttggacagaggaaaacccagatgccgattttcctcgtacttataatcgaagtaatgaatattttataaatcagcagaatacattctggttgcataaaactgattatatacgtttgaagaatatagaattgggatatactgtaccatctatatggagtaagaaaataggtgtggaacatttacgtgtttatattaatgcttataacctgctgacaattagtcctgatatgaaggattatgatcccgaaaacacaagcggatcgggatataattatccgttgaataaagtgataaattttggagtaaaccttactttttaaataaaatgaaaaatatgaaacgtttatatggattatttgtattgctatgtcttatgctaacagcatgcaatgatgattttttggatgtggatccagtagaccgttattcagatgcagttgtctggacggatgaatcattaataacttcttttgttaataatatttacgagggacagaaatggggatttcataccgtaatgctttcttctttgtgcgatgagtcaatggaggtttgggcatgggagagccagccggtagtgatgagtgaattgagtcctagttatcaaggtattcttgctcctaatttttggattataaccttccataatataacttggaccaatctttataaaaatatccgtgcctgtaatatcttttttgaaaatgcagagaaatatgctttagaaggagatgttgtcgataaattgaaaggtgaagtgcattatttacgtgcttatttttattattggttgttgagccaatggggtggtgtccctttgattgagaaatcttttactccttctgatgatttactcgtagctcgtaatacgtttgaagaaacggtagattttattgtgaaagatttagatgaagcagcttctattttgcctttgaacggagataaagcccgtgcaacaaaaggtgctgctatggctttgaaagcccgtgtcctgctttatgcggctagtgacttatttgtttctcagtctttatgggcatccggttatgagcatcctgaacttatagggtatgtgggaggtgatcgtacggaacgttggcaacgggccaaaaaggctgctaaagctgttatggatttaggtatatatcatctgtatggtgaaaatggaggatggaaaaatagagaggaagctactcaaaactatgctgatattttcttatgtcataattcggatgaagatattatggtacaatattatgattatgtaaatcataatagcagtgattttcaattgcctcgtgttggtttgttcaatagtcccaatggttttcatggttggggcggaaatactcctactggacaattagttgattcttatgaaatggcagatggcagcaaatttagttgggataatccacaacaagcagcttacccttatcaaaatcgagatcctcgcttctatgcttctattatgtataatggttcttattggcgtcaacgtccggatgatacagtaggtagtgatcctgaaggaatagtacaaactgcttattatcagcagtcagatggaagttatacaccaggtttagacactcgccaaggccctattgaagattggaatggttcttatacaggatattatatgcgtaagtttttagatccttcagttaatcatcagtatgataaacaaccttatccttggcgtcagatacgttatgctgaagttttgttgaattatgctgaagcatgcatagaattaggtgaagatgctgaagcccgtaagtatatcaatatgattcgtacaagagcgggaatgcctgacataccagattctgaaatgggagatgtcttgaaagaacattatcgtaatgaacgtaaaatagaattagcttatgaacaacatcgttattttgatatccgccgttggatgattgcacctgaagtgattaagaatgttcaaggaatagatattcgctatccttatggagttacagagcctaattattccattattgatgtgcaggagaggaaatggaatgataagtcttatttactccctatttatttggatgaaatgcagaaaaatgatttattgatacaaaatccattatattaaaaaatcatagataagcccgtagcttaatgatggctacgggctttattaaaaagaatgattttttattccactcccaaatccttataagttctcggagccggaacgggaggtaatggtttgcgatcctttaactcttgtagaattacctcaatggctttattcaactgctggtcttcacctaactgttcttttaccgggtcattatcaatcagaatatcgggatctactccatggttctccactatccattgaccggtctttgcatcataattggtaaagaacggaacacgtacatccgtaccatccatataaggcaacgggccactgataccgataatgccaccccatgtacgagtaccgataactttaccgattttatttgccttaaaactccatgggaacaagtcaccgtccgaagccgagtatttattgattagcaatactttcggacccactagtgttgcatcaggaatggtgccgattttggttgatccacgacgcatggtcaggcgatagggttcacgaagcaaacgttcgataatcattggagatacattaccacctccattggcacggtcatcaataatcaaggcttctttatcgagttggggatagaagtagcgggcgaattcattcagaccgtccggtcccatatcgggaatatagacgtaacctacacgaccattagttgcttcttccacttttttgatattattctgtacccagttataatgatacaatgggtattcattgtctaatggtttaatgaccactttacgtactcctttacttgatgcggtacggtttatgcttagttcagtcaatacattggctttgcctgccagcagactgtaaatgttatcaacagtagctgttgagatgccatcaatagctgtgatataatctccttcttttactccgatacccggttctgtaaggggagaacgcagtttctgactgtaaattgcacccggtaggattttgtcaatacggtagaagccactcttgtcacgactcagttcagctcccagtaatcccattggaatacgttcgggaccttttatttcacccggattcacataagcgtgtccgcaagccagctcggcaatcatctcaccgatgatatagttcaagtccagacgggtttttgcatgaggaactaatacagcatatttttctttaatcgcattccagtctactccatgcatattttccagatagaatccgtcacggaaagcccgccatgtttcatcgaatatctgagcccattcttgactgtaatcaatgggagcaaccatatcgcttaagttaatattctcttccaatgaggctttagtgcatggaaaatcacagatatacagattatttcctttaaagaacaatgctttcttatgattggcagctacatccatatatgctccttcggctacgatttcttctttttgtttagccaaatcatatactttggtatttctaccactggcataccacacttttttaccgtctgaatagaaattatcgtagttacctgcttgtaaaggtaatttaatcagtcttccgggcaagccttccggatctattttaactgtattatttgtggcttccggttttttattggccgcatcggtagtctgttgttctatgctgaccatttcatccgaaggtaataaaggtgacggtgtgtcattggcgagcatggccatatagactcctcccatacgattataggcatgattccattctgtctggctgtagatgggattaaaatctctttcggaactgaatatgaggtattttccatccgtgctgaagacaggtgaagaagaactgtaccatttttcggtcaccggatattccttacctgaagtcagatggtatacataaatgacactcatgttattagctccggatttagtataggtaatccattggctgtctggtgaatagttcacttcatagaactctccttccggattctgcatgacagtccgtttcgcttttgaggcaatatcaacttctacgatacggtttttacggtcggtataaagtattttcttgctgtccgggctccacatcagttggcggatataagtatcattgttttgggtcagttggatgggatcacccccttcgacagattgtagccagatttcagtttcaccggtacggtcactgatataggctatttgtttaccgttcggactccattctccttcccgttcattggctcccggggtgcgggtgatatcacgggttacccctttttcggcagggatatcgaatacttctccgcgagcagttactaccagacggtggccatccggtgaaaggctggcggcagtcaggttatctgctacccgtttcatttcttttcgggcatagatattgtctgaagtcagcgtgatggagattttttctgatttgcgcgttttaggatccagtttatagaggtatcctccatgttcatagacaataatttgtccgttactgctggggaattttacatcataatccgtatagttagttactttttcagtttgtttggtccggatattataaacaaagatattcatggtgcgatcccgatcggaaataaagtagatttcctctcctatccacatagggataatatcttgtgcaatattattggtgatattctctactttcttagcagccggatcataaatccaaatgtcatctgccatgccaccgcgataatatttccaattacggaattctcgcataacccggttgtaagccagcttttttccatcgggagaatagctgcaaaaacctccttcgggtaatggaatcacttcgggcattcctccgtttttcgatatgctccatagtttgccatcaaaaccgtcactgatacgattgcggtagactatgttttttccatccggcgtccaagtcattactatgttattgggacccattcgatctcctaagtcatcccggttgtttgttgctgtgtaggtaagtcgttggggttcgcctccgtcagttggaatcagatatacttcagtgttaccgtcatattgaccggtgaaagcaattgattttccatccggagaaaaacgtgcgaacatttcataaccgatatgggaagtcagcttttgtgcttctcctccattcaaaggtgctttgtacagatctccggcgtaagaaaagacaatgtcggagccattggtagcgggaaaacggagtaatctagcctcatcggcatgtccggtgaaagctgttcctgccagtaacagggagaataatagctttttgttcattttatttagggtttgattttcgtcggaaacaaagttaggtattattcttcagattatgagctggaacttatttcttttttcagttgattattactagagttttttaataagaaatagttttattggcatgatgtttttaagaaatgctatatttgcaatattaatagtcttaataaagatggatgcaagtatagtagataaagatttgattgaaagaataaacaaaggagaagaaaaagcttttgaggttttatataatagctattttgtctatctctgtgcttgtgctaattcttatatctttaaccctgtggaagcgcaagatatagttaatgaaacttttgctaaaatatggtataggcgtggtgagttatcttttcctattcatgcttatttgatacgtgctattcagaacgggtgtttgaattacctccgttcgcttcacagccgtgaaagaattatagatgaataccgtgaagcattacttgagtatcaagaagaattttgtgcttccgagtgttcgcctttgcaagaaatggaattagctgatttggaaaaatcagtccaaaatatagtgtcttccttgcctgataaatgcaggttcatttttgagcaatatctttattccaatctgactcctcaagagattgcagataaaaataatatttcagtcaatacagtcagagtacatgtaaaaaatgccatggataaaataagagaaaaggtgggatctagagtagggattctattattttttcttttctaaaaaaagaatgaaaaaaatctgtttttggcttaaatgttttgtctgttgcttgtgtattatctatagtagataattccaaagatataaaatgaacagccaaatagatgaatttgaacgaataatgctggattatctgaaaggcgaaatctcgtctgaagatatgcagaaactaactatattactgaaaagagagaatgcttgtcgcgaaaaatatcgtgaaatagcccgttcttatgcattggcatcctcttcttggtttgcacgcaggaaagagcaaaactttgagcaattgtgtgatacattgaatttctattcttctcgtaaacattcttttttccgtaaaataagcgtttggagaagcgttgctatatggactttactgattggttgtagtataacattcttttatttatatcattcgtctagtccagaagttcttactccttcttattgtcagattgaggttccccagggggccagttcgaaattattattgcctgatagtaccattgtttttctgaatggggggacggttttaaagtatgatgtttctttgcagcagcggactgaccggaaagtttttctttcaggtgaggcttatttcaaagtttctagaaatatgctcaagccttttattgttcatacgggggaattgaatataaaagtattaggtacaacatttaatgtggcttcttatcctgatgatgcggaaataaaagtgagccttgtggaaggtagtgtgaatgtttacactacttcagatgctaaaaagaatattcttctttctcctgatgagcaagctgtttataataaaaatgataaggtattgtctatgagaaagatagatgcggtatctcaagcagcatggactacaggaagactggtatttgttaatgaaaagttatttgatattttgaaaacaatcgggaaaaaatatgatgtacagatacttgtgcagtctcggaaagtgtatactgaatatttttcaggaagtatagatacgaatctgactttggatgaaattctttcttatttagatgtggataataagtttatgtggagaaagaaaggaaaaacaatagttattacagaccggtaactgatagataaaaagtactgtgaaaagtacatgcttaaataattgttaactaaaaattctaagtatgaaaaaaaacttttgtaaagttcgtagggggcattgcctctctcttgtatggatagtttcatttctactatggggaaatgtcactatggccgcattgcctattcaggaggcaaaactttctatacaacagcgttcagtggctttgagtcgggttttttatgagattgaaaaacagaccggctactctttccttgttcgtaataatgatattaatatgaatgagaaagtatctattgatgttaaaaataaaagtgtggaagaggtgcttgagatgttgtttgtagggaaaaatatccgttataaagtggaaggggagcatatttctgtttataaaccccagcaatcaagacaaaatgcaattaccggattggttatggatgtggcaaaagaaccagttattggtgcttctgttgtggtaatgggatctactaacgggtgtatcacagattttgatggaaaattttctttagaagtttctgaatttcctgtgaagttacaaatcagttatattggttataaatctcaagaggtaactgtacgtgatacaaaaactattcaggtggtattacgtgaggacactgaaactttagatgaagtggtggtagtgggatacggttcgcagaaaaaagcaaacctgacaggagccgttgcctcggtcaagatggatgaagtgataggcaatcgtcctttgtcacaagctgctgatgcattgcaaggtacggttcccggcttgtttgtgtctagtgatggcaatgctccaggtaaaagtaagtcattccagattcgtggcgcttattctgtaggtattaaaaatgatgatggttcttatggtagtgctatcaagcctttgattttgattgacaatgtggaaggagacttggatatggttaatcctgaggatattgaaacggttacagtgttgaaagatgctgcttcagctgccatttatggtgcccgtgctgccggtggtgtaattttggttactaccaaacgtccgaaaggagaaacttctttccaactgaattataataataactttgcctttgcaactgccatgaatttgccagaacaggcaccgttgatggaatatttgcaggcctattctgatgcagccggagatcaattctggacaatgggttcgcctagtgtaagcaaatggatgggatatttggagcaatatcgtaataatccgtcttctattcctactgtcggcgatggtatctttaaagatacggatggggctgtttattatatgaatgaaaaggacttggtgaagaacatgcttgagactagtttccagcatacacataatatatcaatgacaggtggtactgataagctccgttatcgtctttctgccggatttattgataatgacggtgtgctgattactgacaaggataaatacagacgaatgaatgtcagtggatttatatctgccaatgttacaaaatggtttactcaggaagccacttttagctatgcacatagtaaaagaatggagccaaagtctgctttgggcgctgtttacagtactcgtcttgcttctttctatccggaaggcaatatgccggaaggtatttctgctgcaggcgatggattacctttctttactccgtccaatcagatacgttggtccaatccagaaaaaacattgtatgacaatcctcgtattttcctgaagtctatattgaagccattaaagggatttgaaatagcatttgaatatactttcgacaagaatatatatgattatagctggtatacgggaagtgtggtatatactactgtgcaaggtggtaaagacacgactccgaccaatgactatttacaaaaaaagaaaagatataccgactataactcaatcaacttgtatggtacttatgatttctcattgggtaatcatcagtttaagataatggcaggtttcaatcaagaatccagttatcaggaaacaatggaggctttatcctatggacaagctgttattgaggtgccttcattgggttcgggtacatctacattgaaagctacggacaagtataatgagttttctgttcgcggcggattcttccgtgtgaattacaactatcaggataaatatttgctggaagtaaacggacgttatgacggttcttctaagtttcctaaagaatcacgttacggtttcttcccctctgtttcggccggttggaacattgcacaggaaaaattcatggaaagtactcagaattggttaggttctttgaagctacgtgcttcttatggtatgattggtaaccagaacgtgcctgcttattcgtttattccaactatggcggtgaataataaatacaatggttggatatccaatggtaattatgtaaccgctattacttctattccttcattggtaagtcgtaactttacttgggaaaaggtagggacattagacatcggtattgatttctctatgttcagtaatcgctttacaggtacttttgactggtatcagcgtaatacgaacggcatgcttgctccgggtgtgcaattgcctgctgtagtaggtgcggatgctccttatcagaatacggcagatatgcgtacacgtggctgggaactgagtttcaattggcgcgaccagattggaaaggtgagctaccgagtcggtttcaacctgtccgacagcaagtcaaagattgtgaagtatgacagtaactcatcctacatattaagcagccaaaagacgaatgcgctgacgggtggaacatatacattttgggagttttataaaggtaaggaattaggcgaaatctggggatatgaaacagatggttattataccgtagacgattttgtcgatacttcttcatggaaattaaaggatggcgttccaagcatagatggctataatcctcgtccgggtgatgtgaagttcaagaacttaatggatgatgaaagagggacaaatatgatttccagcggtaacaatacgttgaataatccgggcgaccgtaaagtgattggtaatgaaactcctcgttatctttatggtattaatctaggattaaactataaaggttttgatttgagtgcctttttgcaaggaaccggtaaacgcgataaatggattgccaatacattgactttcccattatattctgactttaagtttattcctttatataaaggtttgggtgattactggcaaccggtagatgctgccaatggtgattacacagcagttaatcctaatgctgagttcccacgtatttatggcaactatggtaaccaaggctctaattaccgccagtcagacaagtacttgtccgatgcttcttatctgcgtatcaagaatgttactttgtcatatacattccccaaagcatggattaccaaaatatctttgtcgcagttacgtgcttttgtcagtgtagaaaatctggcaacgttctcatcattgccaaagggtatcgacccggaaacgctgaaatgggattatcccgcattccgcacagtatcctttgggcttaatcttacattataaaccttaaattagtacgagtatatgaaaagattatttataagtttagcaattctcgcaggaatcagcctctctagttgtaatgatagtttcttggaaaagactcctgttacagacttgacggagaataatgcattcaattcctacgataacttcaaggcttttatgtggccttgttatgagatgtttacaaataatactattcgcacttccttacaaggattcggacaagacggacagtataagggcgatatggcagcaggatactttcagcaaaaatatgaaagtggctacaatgaatttgcttatcagacagttgccagtgtagcatccggtaatggctgggattttaaatcatttatccgccgtgtcaatatcatgctttcacacattgataattctagtatgacagaggctcagaaagaccattggcgtgcagtaggatatttttttcattctttttggtatatggaattgatagatcgttttggcgatgtgccttgggtggaccaggtattgcaggaagattctcccgaagcttatggacctcgtgtggatagaaaaaccgtagccgacaaggtattggaacgtctgcaatgggcggaacagaatattggaaatttcacatcacaggatggggacaatacgattaaccaagattgtgtacgtgccgttatttcgcgtttcggattacgtgaaggtacatggaggaaatatcatgaattgggtgatgctgaaaaatatctgcaagagtgtgtacgcgcatccgagttattaatggccgcttatcctactctttacacaggaacagacggtcaacccggtgccggatatggtgaaatgtggacaacagaggatttgggacaagttccaggtatcattctctataaatcttatgtgaaggatataaatcctatgggcatgagttatattgaacatacttcttcacactatgtggagatgaaccagaatacggtagatctttatttgatgaagaatggcaagccgattttggctgacggatcgggctaccatggaaataaggacatgtatgcggtatttcgtgaccgtgacccgcgtttgtatcacacggttatacctccttataaagtaaaatctggaaaaggcgactatcctacctggtcgtatacagacaatccggcagaccgtgaatatattgatattatgggagcaaatgaaagttgcagtaacccgggtgttggtatgaaacgtttgcctgggcagaactggagtgcatcacttgtacctgaaataccaagattaggtactggagcatttgtgacttgccgttcaggctactatgtatggaagaattgggataactgggaaaccagctttaataatggtaatttgaatacagctgacaaacctatttttaaaattgaagaagtcctgttgaatgaagctgaagccaaatttgaattgggagtatttgaccaaggggttgcagacaaaacaatcaataagttgcgtgatcgtgccggtgtagtcaaaatggtggttgctgacattaatgatagttttgatcctaaccgtggaaaatactatcctaaaggtaatgaaagtggtattttggttgatcctgtcttatgggaaattcgtcgcgaacgtattatagaattgatgggtgagggatttggtatttatgatatccgtcgttggcgtatggctccgtggttcctcaataaacctgcaactggtctttggatgagtaaagaagaggcaatgaaaaataatatgactttatataatcctgaaactggttattctgatggaactgacggttcattgacggaaggtaatttgtatcttttcaatgatcctctaaaagaaggtaaaggttggttagataaatattatttgtatcaagtaccgactaccgaaatattattgaacccagaactggaacagaatcctggttggtaatttatagtgtgatacgaatgaggctgtctcaaatgcggaataacgtatggagacggtcttgtttggtttttaaacttagaaaaatcgaaataaaatgagatttcagaaaataggattgactactgtagtgttgtgtaccgtaggaatacaacagagcttttctatcgatatagttacaaaagaaaaacctaatatcgtgtttattttggctgatgatttaggttggacggatttgggtgtaatgggcagtgattattatgaaactcctaatatagaccgtcttgctacagaaggaatattgtttgacaatgcttacgctgcagccgccaattcagcacctagccgtgcttgtatgatgacaggaatgtacacgccacgccatggagtatatacagttagtcctcccgaccgtggtgatcgtaccaaacgtaaatatatagctattcccaatgtagaagatgtctgtgccgactttgtgactatggccgaggctttgcaagaacagggttatcagtgtggtcatatcgggaagtggcatttgggggatgatgaggacggtacaggacccttgtcacagggatttatatggaatgtgggcggtaatagagcaggagctccctattcttatttttatccctattgtctgcctgataaaagtaaatgtcatgtgggattagaagaaggtatattgggtgaatatcttactgatcggttgactgaagaagctgtttcttttataaaatctcatagtgaaggtccttttttcttacatttgtcccatcatgccgtacatacggttttgcaagcacctgattcattgataaataaatatcgtaataaaactcccggtaaatatcataagaatcctatatatgctgcaatgattgaaaaactagatgatagtgttggtaggatatgccaagttattaagacattaggaatagcagatcgtacaatagtcattttttattcagataatggaggttcggaaccagtgacagacaattatccgttaaatggaggaaagggaatgccttatgaaggtgggagccgtgtgccgttgattataaggtggactggtaaaatagaaggaggcatccgttcatctgttccaataacaggagttgatttttatccaacttttgttactttggcacagggtaagattcctgctaacttagatggaaaagatatttttacgcttataaataataatgagacggaacgtgatcttttctggcattttccggcttatttggagtcttatttaaacgggggaagagatttccgtgcaaaaccttattccagtattcgttcaggtgattggaaattgatatatcattatgaagataagtctatggaactgtttaatttgaagaatgatctgggagaatcacaagatctatcaggttcaaatcctgtaaaacgaggagaactttatcagaaactgatgaagtggattcaagaaactcatgctcctattcctgtgaaattgaatccttattatcgagagtaggtgaatgatatttttttcttctatagctttgcagcctaggatattttctctaaattgccgatgtttatagcaggagtagtaattattaaattcagtaaaaaacagaatatatgaaaaatcgaaacctctttcttttaaccagtggattagcatttcctctattaggcgcttatgctcagaaaactcctaaaccgaatatcatttatattatgtgtgatgatatgggttatggtgatttagggtgttatggtcagtcctacatcagtacaccgaatattgataatatggctaaagaaggtatgcgttttacacaagcgtatgccggtagtccggtgagtgctccatcacgtgcgtcatttatgaccggacaacattccggacattgtgaagtacgtgggaacaaagagtactggcgcgatgcccctgttgtgatgtatggaaataataaggaatatgccgtggtggggcaacatccatacgatcccggtcatgtgattatacctgaaataatgaaagataacggttatactaccggtatgtttggtaaatgggcagggggctatgagggatctgtgtctacgccggacaaacggggtattgatgaatattatggttatatttgtcagtttcaggctcatttatattatccgaatttcctgaaccggtatagtaaatcggctggtgatacggcagtggttcgtgtagtgatggatgagaatatcaactatcctatgtttggtaaggactatttcaaacgtccgcaatattctgcggatatgatccatgaagaagcaatgaaatggttggataaacaggatggcaagcaacctttctttggtatttttacttatacgcttcctcatgcagagctggcgcagcccgaagattctattctgacaggttatcaaaagaagttttttgaagataaaacttggggtggacaggaaggatcaagatataatccgtcggtacacacccatgcgcagtttgccggcatgattactcgcttggattattatgtaggagaagttttgaacaaattaaaggagaaaggactggacgaaaataccattgtgatttttaccagtgataacggcccccatgaagaagggggagctgaccctaccttctttggtcgtgatggcaaacttcgtggattgaaacgtcaatgttatgaaggggggattcgtattccgttcattgtgcgttggccgggtaaagtacccgaaggaacggttaatgatcatcagttagctttctatgacttgatgcctacattttgtgacttggcaggtgtgaagaattatgtgaagaagtacactaacaagaaaaaagacatggattattttgatggtatttcttttgctccgactttgttaggacaggaaggacagaagaaacatgatttcttgtattgggaatttgatgaaaccgatcagattggtgtacgtatgggagactggaagatggtagtgaaaaaagggactcctttcctttacaatcttgctacagatattcatgaagaccatgatatcgctgccggacatccggatattgtgaaacaaatgaaagagattatcagaacacagcatactccgaatcctcatttctctgtgactttgccttcatttgaataaatagattttttattctgatattcctcaatctattcatttagattggggaatatttttttatgttccataaacctgctatctttgcctcgcaaatttaaaaatattccgatgagaatttaaaacattcatttccatacaactatttgtttttacgttgggacagcaggcgaaataatttcgtttgttgcgcaatagttgtcttcttattccaactacgaacttttcagtattcatatttaaaattcttagaaagagtatgtgtatacatgtacagtccattacttatatgcatccggataaagatgtgcttttcagtaatgtcagttttactatcagtaaagggcaaaaagtagccctcatcggaaacaacggttcgggaaaatctaccttgatgcgattgataactaaagagctattaccttctgaaggacaaattatatgtccggatatcccctattctattccacagcattttggtcagtttaatcatttgacagtagccggggcattgggaatagaaagaaagttatatgcacttcatgccattttacagggagatgcttcgatagagcattttacggctttggcggatgactggaaaatagaagagaaagcggttgctgctttgaatgaatgggggttggtaggagtacctctttcctatcccatgcatttgttgagtggcggtgagaaaacaaaagtttttctagcaggaattactatatactctcctgcttttattttgatggatgagcctaccaatcatttggatgacgaaagccgtatccggctgtaccgttttataactactgctgcagcagggatactggttgtcagccatgaccggacattactcaatttactttcttctacctatgagcttactgcaaaaggtgtcacttattatgctggaaattacgatttctataaagaacagaagaaattggctgtagaagctctgcaaacccggttggaggagaatgaaaagcaattacaaaaagcccggaagcaggcacgtgaggtaatggagcgtcaacaaaagcatgatgtgcgaggtaaaaaacaaaatgtgaagaaaggagtcggaaagatggcaatgcatacattcagggatcaggctgagaaaagtgctgtccgtttaggagatgttcatgctgataagatccgtgttttggcaggagaaacagtagaactgcgtaaagctttacctgatatgaagacgatgaaagtaaatttcaattcatcttctttgcatatcggtaagatacttatcgtagcttcaagtgtgaattattcgtatggagaaaatcctttgtggtcttctcctcttgagtttaccatcaaaagtggtgaccgtattcatttgaaaggaagtaatggtagtggtaaaacaactttattgaggttgataaccggaagtcttgctcctactcaaggttctttgatacaggcagaagggctgacgtacgtttatcttgatcaggaatattctacaattcgtaatgatttgtcggtattagaacaacttgctttattcaatagtgaattgtatgataatgaattgagaacgattctcaaccgttttttgtttcctgtttccacatggaacaagaagtgtagctatctgagtggaggtgagaagatgaaactttctctctgttgtcttatggtgagtgcacaggcccccgatgtttttattgtggatgaacctactaataatattgatattctgagtatggagatcttgaccgaaactttgaaggattatcaaggcactttgttggtggtgagtcatgacaactattttgtgcaacaaataaaggcagataagcagattgagttattctgatgttttattttatcaagtgcggcatttttgttttaaatatagagtttgacaaaaatgccgcagacttgatttattttattcggagttattattgcagtgtcagcgtctttacttgtaattcagcatctttagaattaccccctaccattatatcgaagtttccggctatggtgcgcatggtatttgtctgcgcgtcccaccattccaattgtttgggtgttaactctaattctacattgactgtttttcctgcaggaatttgtacacgtttgaaagcacgcagcgttttagccggtccttccgtatcttcttgttttttcagatatacctgtactacttcttccccgtcacgattaccagtattggttacaggaataaccattttggcagtttcccctactttaatcgtttgctccagtttgatgttaccatagttaaaagtggtataactcaaaccataaccgaacgggaaaagaggatcacctttaaaataacggtaagtgcgtcctgtcatattataatcttcaaagtcaggcaattgcgctatattccggtaaaaagtaacgggcagtcgtcctgcaggattgtaatctccaaacaagacttcggcggcagctttacctccggattgtcccggataccatgcttgtaaaatagcctgacaatattgggtttcgggctccatagcaatgggtgatccggaaaaattaacgaaaataacttttttcccggcatcacagagtgcttttattaattcacgctgaacagccggaagctcgatgtcagtacggtctcctttgcggaatcccggtaaattgacacccatctcctctccttccaaacttggagatataccgcctgcaaatataactatatcagcatctttcacttttgctaccgtattcttaatgttgacttcttctttaaacccaagatcaaaattcaactgtgcgtctccactaaagtattggaagcggatttctatatcgtatggcttgccggcttctgcatgcatggcgtaagcttgtcccctgcccccatgtttgttggtgaatttctttacttcttcaccatttatcaataattgtgtagctccacaactataaaagttgaaaataacctctcctgtttcttggggggtgaacacactttgatagatggccgagaaatcggtcaggttcacaccgggggcaaatacggtggctcccgaggtacaaaggcggaacggggtggtgagttgtgcggtggctgccgtatttccttcatattccttgttgttccaatagcgggcggagaaccctggaccttctttagaagtacactggctgaaaacgcttctgattaatgagcgttctacccagctgcaaccttgttcatagatcagtttgtcattctctcccatggctgagcggataccttccaataaggtgatcgtatgtttgggagtaccgttataattaccccattgcatcacagagtcatttgcgttaggtcccatgacggcgatggtttgtccaccgcgtttcagtggcaggatattatttttgttcagtaacagcgtcattgatttgcgtgctatatctagtgacagggaatcatgttctgccgagcaaaccacagaataaggaattttagtccattccactttactgggatcgtccatttcacccaattcaaagcgtgcttttaataatcgttttacggatacatcaatatccttttcactgattaatccttttttagcgctttctactaatgctttataactagaaccacattccagatccgtaccgcttaatactgcggcggcagaggccgattcagcgtccggatgtgttttatgtcctttttcccgatagaaatcgtcaatggcgccacagtctgagagtacaataccttcatatccccattcctgacggagaatttgcatcagcaggcggtcgcttccgcaacaaggatctccttccagacgattgtaggcacacattacttcttttacttttccttcctttaccaaggcttcgaaaggaaccagataagtttcatgcaagtcacgtggttttatattttcggcattgaattcgtgccggttccattccggtcccgagtgaacggcaaagtgcttggcgcaagcgtgtattttatcgtatttttgatttgcatccgtgcattgtagtcctttcactacatttacccccatgacacttgtcagataaggatcttccccatacgtttcaatacctctcccccatctgggatcgcgataaatattgacggtgggtgtccacatagtcagaccttgataacgctcgtagcttcctgcagccgagtaagctgtatttttggcccgcgcctcatccgatactgccgtataaatggtatgtatggcgtcgggttcaaaggaagcggccattcctatgggttgtggaaagactgtagccagtccgcttcgtgccactccgtgcaaggcctcattccaccaattataaggtttgatgcccaatctttcgacaggtttggagttgtccatcattaaagctactttttcttctaatgtaagttgctgcaataaatcttctgcccgttcttcaggagataaattactgtttttataagccggttggttaccgcaaccgctcagaatcacaagggaagcaaataaatatagaattctgtttctcatagtaaaatagtaaaaatgattagttacatggcaaaaatagaataattatgagaatagtccgtgtattttttgactaaaatggtgggagatattgttttttgtacgaaaaggtgaggaatatataaaaaaactccggtcaggtatataggctgaccggagatgtattgaaaacagcaaataatgactatttatattctgcccagtctatcaagcgcatatcccctttcttggccagtgtatcatgcatagccagtgcggcagaaatacaatgaggagtctgtcctttggaagacatttttacatagtcccaaagaatgttcttatagtctggatgtgcacagttttcgatgatggcttgggcgcgttctaccgggctctttcctcgtaaatcggcaacaccttgttcggtaatgataatattgacatcgtgttcgctgtgatcttcatgagaaaccataggaacgatggcactgatttttccttcttttgccacagacggacaagtaaagatggaaatataggcattgcgggtaaagtcaccagaaccaccgatgccgttcatcatcttagtgccgctgatgtgagtagagtttacattgccataaatgtctgcttcgatagcagtattgatagagataacaccgaggcggcgtataacttccgggttatttgagatttcggatggacgcattaccagtttgtcacggaagaagtcgatgtcatcataaattccttgcagacattcgtttgtgacagtcaatgaacaagtacttccaaatttcacacgtccttgacgaatcagatccactactgcatcttgcagtacttcggtatacatttcaaaagcagggattgtcttgtctcgtcccaaagcgcccaatacggcattggcgatgtttcctaccccactctgcaatggcaggaagcttgcaggaataatgcctcgtttcatatcagcagccaggaagtcggcaacgttttgtccgatttggtcggtgataggatccggtgcggtgaatgaacgggcctggtcaggtgtgttcacttccactactccgatgattttcttcggatctacctgtacgtaaggtaaaccgatgcggtcactgggcttgaagatgggaatttcacggcggtaaggcggatcaagcggttcataaacatcatgcagccccataccgtttttactgtgggcggcgttcagctcgataattactttatctgccagacgtgcgatggttggagcgatacctccggcagctgtcaggtatactttgccgtcgggtgtgatttcgcatgcttccagaatggcaacatctactttgcccatgaagccataacgtacttcctgtgccatttgtgacaagtggatgtcattatatgctatttcaccgttattcacggctttacgaaaatcggggttggttgtgtagggagcacggtaacggattgcttttactctggacaagatcccgtctgtagcatcccctgtagaggcgccggtaaaaatactaatttggaaaggattacctttggcatgttcttcttctgctattttggcgacttcgggggttacggctttgggtgttcctgctggagtaaagccactaagtccaatattgtagccatgcttgatgtagctggctgcttcggctgcggaaataatattaaatcccatgatattcaatgtgttattctttattagtatagttgttattaatattttcgattaaaaatttctgaataaatgaaagcacgccgcgcctcttctttagtactcagttttataggagtccggttttccctcttattttctgccagaggtggagcgaccgcttttctgattattgactggttctgcatacgggaggactgaggtttgcgaaccgccggagctggagaaacagacaccttttcttccatgctttcctgctctatttcaggaaacatatctgcaagcacttccttgggggaaggtgttttcttctctttgccggcttttgagatttgttgtacgatagccacaacaatgattactataaatatgagaacctgaatgatatccatactttccttattatataatgaatgctcaaagttagaaaaatatttcataaccaactctataaaaggacataaaaaaaggaagagaacttcacagttgtcttcccctatttttttaacctaaaccttaactatgaaaaaatctaatgtttttcggaagcaaatatgcgaattataataatacgttggtaacgttaacggtcttttttgttcactggttataattatttaacagttaaatgcataaatctcttataatatccaattttcggctcttttattcgtttaatttgtcggtaactccgtatctttgcctacgaaaccataaaacagagaaaatatgaaagaaacaacaggagcagactttaaatctgcaactgattccgagaacaaaaaattgtttattgaaacctacggatgccagatgaatgttgctgatagtgaagtgattgcttctattatgcaaatggcaggctaccatgtatgcgaaacattggatgaagcggacgctgtatttatgaatacctgttctattcgcgacaatgcagaacaaaagattctgaaccgtctggagtttttccattctatgaagaaaaacaaacgtcggaatctgattgtcggtgtgttgggctgcatggcagaacgtgtaaaagatgatttgatcgagaaccatcatgtagatcttgtcgtaggaccggatgcctatctcactttgcccgatttggtcgcttcggttgaagcgggggagaaagccattaatgtggagctttctactacagaaacctatcgtgaggtaattccgtcccgtatttgcggcaatcatatctccgggtttgtatccattatgcgtggttgcaataatttctgtcattattgtattgtgccgtatacccgtgggcgtgagcgcagccgtgatgtggaaagtattctgaatgaggtgcgtgacttggcagccaaaggttataaagaagtaacgttgctaggacagaatgtaaattcttatcgttttgagaaagagggtgaaataattactttcccgatgttgctccgcacagtggccgaagcggttccggacatgcgtgttcgttttaccacttcacatcccaaggatatgagtgatgaaaccttgcaagtcattgcggaaacgcctaatgtatgcaagcatattcatttaccggtacagagcggcagttcgcgtatattgaagctgatgaaccgcaaatatacccgtgagtggtatttggaaagggtagcggctattcgccgtatcattcccgattgtggtctgagtactgatattttctccggctatcattcggaaacggaagaagaccatcaggaatctctatccttgatgcgtgaatgtgcgtatgattccgcctttatgtttaaatattccgaacgtcccggaacatatgcttccaaacatctgccggatgacgtacccgaagaggttaagatacgtcggctgaatgaaatcattgaattgcagaaccgtctttctgctgaaagtaatgcccgtgatgtgggtaagaccttcgaagtgatggtagaaggtgtttccaagcgttccagagaacagctttttggccgtacacagcaaaacaaggtggtagtctttgatcgtgggaatcatcgtatcggtgattttgtccatgtacgcattactgaagccagttcggctacattgaaaggagaagaggtgttctgatggggaaaaaagaagaatataaggaaaagaacttgcaatatttgcaagttctttctacacaggaaggtatttgttctttaccttgtaatatgttttataaagtattgcagacaggtacgggtacagtttcacctacgatccgcagtattgtcaccgttcattatcggggtagtctgataaacgggaaagagtttgataactcctatgaccgtaactgtcccgaagctttccggctgtgtgatgtcatagagggatggcagctggcgcttcaacgtatgcatgtaggagataaatgggtggtttatattccttatactatggggtatggtagccgtacaagcgggccgattcctgctttctctacattaatatttgaagtggaactgctgggcattgcataatgcctccggttatcggttatgcagcctgtcattcatccggtcttcgtaaccgtcacgatatttcttttcgggcataacaatccataagattatatagacaataatgcccgaaaaggctgtgaaaaccgtggcaaatgaatagataatgcgcactatcgtaacatcccagccaaaataatcagccagtcccgcacatactccggctagcattctgttgttggaacgggtcagttttttattttccatttctgtctcttttgaagttatctgcacaaatgtaggaaaagtaaaaacgaattattaacttatactcttaaaagtacttaaaggatagttcttctcattcaatttatttgttattttgcagcaaattagggcaaaaagtggatatactcaaaataaatacttgtccgttgtgcggcggaaaacatttgggacatgcaatcacttgtacggatcactatgcttcgggtgaacaattcaatttggttcgctgcgatgattgtggctttatttttacacaaggtgcacccgtggaagccgagatagggcgatattatgagactcccgattatatttcacacactgatatccgcaaggggctgatgaaccgtgtataccatgaggtacgcaagtatatgctgtcacgcaaagccaagctgataaaacggacatccggtttgagtaaaggtactttgttagacattggtaccggtaccggatatttcagtaatacaatgaaggagcgcggatggcgggtgaaagctatagagaaaagtccgcaggcgcgtgcgtttgccaaagagcattttgaactggatgtagatacggaggatgctttggcgggatatgccgatcattcttttgatgccattactctatggcatgtgatggagcatctggaacatctgaatgaaacgtgggaaaaattattcaaacttttgaaagagaggggagtattgatagtggctgtgcctaatcccagttcgtatgatgcggaaaaatataaggaatggtgggcagcatacgatgtgccccgtcatttatggcattttacaccttccgtcatgcaacaattcggcgtcaagcatggttttaaattagcggaacagcatccgatgccttttgatgctttttatgtatccatgttgacggaaagatataaaggcagccgtttgtcctttttgaagggaatgtggacgggcctgttggcctggttcagttcactggcgaaaaaagaacgcagtagttcaatgatttatgtattcagaaagaagtgattatgggaaaaaaatcagggtcctttttcgatatgcagttcattacctccagcatcagtacaatgctggtgttgctcttgttggggatggtggtattctttgtgctgtctgccaataacttatccaagtatgtacgcgagaacatcagtttctccgtactcatcagcgatgatatgaaagaagcggacgctttgaaattccagaaaaaattgaatgaggaaccttttgtgaaagaaacttcctatatatcgaaggagcaggcgttgaaagagcagagcgaagcgatgggtacagacccggctgaattcttgggatataatccttttacagcttctattgaaataaaactgaatgccgattatgccaattcggacagcatttcttggatagagcagaaaattatgcagaacaagaaagttatggaaatcaactatcctcaggatttactggatgcagtgaacagcaatatacggaaaatcagttttttgctattgggactggctgcgctgcttacccttatttcttttgcgctgattaataacaccatccgtctggccatttattccaaacgttttctgattcataccatgaaactggtaggggcaagctggggatttatccgtcgtccttttttggtgcggaatatatggatagggatactggccgctgccatggcagatgcggcattgataggaatggcctatgcgttagtaaaatatgaacccgaattgattgagattattacccctatgaccatgcttatggtaatgggttctgtttttgtgtttggtgtggttattacctttatgtgtgcatatatatcaatcaataaatacttgcgcatgaaagctagtgcgttgtattacatttaataataaaaggatatggatagacaaaaattcgcctttgataaaactaattttatattgcttgccataggtatggcagtgattattgtcggttttctgctgatgacaggacctagttcgacagaaggatattttgagccggatatttttagtgtacgtcgcatcaaagtggcgcccgcagtatgtttctttggctttatatttatgatttatggcattgtccgcaagccaaaggacaagacagaagtggttaactcttgatttttttaatttttaattctcaatttttatttaaagaatggaatggtttgaggcattgatccttggtttgctccaaggattgacagagtatttgccggtcagcagtagtggtcatctggctatcggttcggcattgtttggcatacaaggggaagataatctgacttttaccatagcagtgcatgtggctacggtactcagtactttggttatattatggaaagaaataggctggatattccgtggcttgttcaagtttgagatgaatgcggagacaaaatatgtgatcaatatcctggtatccatgattcctatcggcattgtgggtgtgttttttaaagattatgtggaagaaattttcggttccggcttgctcattgtaggttgtatgctgttattgacagctttgcttcttactttctcttattatgcaaaacctcgtttgaaagagaacatcagcatgaaggatgcgtttattataggtctggcacaggcttgtgccgtgatgccgggattatcccgttcgggtactaccattgctaccggtttgttgttgggagacaacaaggcgaaactggctcagttctctttcctgatggtgattcctcctatattgggtgaggcgttgctggatggtatgaagattgtaaaaggagctgcagccggcacatcagatatatctgtattgtcattgattgtaggttttctggcagctttcatatcgggctgtgtagcttgtaagtggatgattaatattgtgaagaaaggtaagttgatttattttgctatctattgtgccatagccggtgccgttacgatagcgtgcacattgatgtaattggatgaattttaaagaaggagaagtattatactttgataaaccgctgaaatggacctcatttgcagtggtaaacaagataagataccatatttgccgcaaactgggcgtgaagaaaataaaagtgggacatgccgggacattagacccgctggctaccggggtgatgattatttgtacaggcaaggcaacgaaacgcatcgaagagttccagtatcatactaaagaatacattgccaccttgcagttgggggctaccacaccttcattcgacctggagaaggagatagatgctacctatcctacggaacatatcacccgcgagttggtagaggaagccttgcagcgttttatcggcaggatagaacagattccgcctgttttctcggcttgtaaggtagatggtaaacgcgcttacgatttggctcgaaaaggtgaggatgtggagttgaaagccaagacgttgattatagacgagatagagttgctggaatgtaatctgcctgagattaaaatcagggtagtgtgcagcaagggcacttatatccgtgcattggcccgtgatattggcgaagctttgaatagcggtgctcatttgatagggctcatacgtacccgggtgggggatgtgagactggaagactgtttgtcggtggaaagttttccggaatggcttgaccaacaagagattgaagaagttataaacgaataaggagagataagatgaaactgtcgcaatttaaatttaaactgccggaggataaaatagctttgcatccggctaagtatagagatgagtcgcgcctgatggttgttcacaaatcaacaggtaagattgaacacaaggtattcaaggatatcctggactattttgatgataaagatgtgtttatctttaatgatacgaaagttttccctgcgcgtttgtatggaaataaggaaaagaccggtgcccgtatcgaggtatttttgttgcgcgagctgaatgaggaacttcgcttgtgggatgtgctggtagatcctgcccgtaagatccgtatcggtaacaagctttattttggtgacgatgattccatggtggccgaagtgattgacaacaccacttcccgcggacgtaccctgcgtttcctgtatgacggttctcacgacgagttcaagaaagcattgtatgcgttgggagaggctccgctgcccagtttcatccgtcgtccggtagaagaggaagataccgaacgtttccagactatctttgccaagaacgaaggggctgtgacagctcccactgccggacttcatttcagccgcgagttgatgaagcgtatggaaatcaaaggtatagactttgcttttgtgacgatgcatgctggactgggtaatttccgcgagattgatgtggaggaccttaccaagcataagatggattcggagcagatgtatgtcaatgcggatgcgtgccgtattgtgaataatgccaaggatgaaggaaagaatatttgtgcggtaggaacgacagtgatgcgcacgatagagactgcggtaggtacggatggtcatctgaaagaatttgacggatggaccaataagttcattttccctccttatgatttctcggtagccaacagcatggttactaactttcacctgcctctctccactttgctgatgctggtagctgcctacggtggttatgatctggtgatggaggcttatcacacagcattgaaggaagattaccgtttcggtacttatggcgatgctatgttgattttggataagtaataccggttggagcagcgtatgagggtttatttgggacttggaaccaatctgggtgataaagaatcaaatctgcatgttgctgtccggaagataaatgagcggataggggaggttactgccctttccgctttttatgttactgccccttgggggttttcttctgaaaattcttttctgaatgccgcctgttgcgtggagagtgtgcttcctcccttggatatattgcgggaaacacaggagatagagcgtgaattaggccggatgaagaagtcggcgggaggtaattatagtgaccgcctgattgatatagatattttgttgtacggtgatttaatactgcatacgccggaattggaaatccctcatcccttgatgactgaacggaggtttgttatggacccgctggcggagattgcatcggatgtggtgcatccggtattgggaaaaaggctgggggagctttaaacctgtaagagtatattaattaaaagaggacggaaaattcttcaaatccgtcattgtggtgtagatagctgattgatagtgtattgttatgaaggattcgtaatagaatccttcataaatgtttcagatgaatcaatgtttataatgttattatattttgtcatggatataatatctatgctcatatttgtttctgttaaatcattacaagaataagatgttagtaataataggaataagtatatttttctataagaggttttcatagtcattagatataaatatattagtaaaaaatagtgctgattgttaatacttatcaaataacaatcagcacatggaatattagatcttaatttgggaaatgaacatggagttatcggctgcattagcaccagagaaagaaatagggactccatatatttctttactatatactcctccttttattataaaatcttgaaatgcaggaaatccagtaacaactttagctgcgtcctctccgttaccacctataatataaatatagatctgagcacgttttagcatttcttttgtctttgagtctagtgatagttctccgtttactattcctgcattgaatgctgctcgaattgatacagaaatttcactatatgattcttcagattctactatcattactccttttcgtcccatattcacagaattcacatatacaggtttttgatttagatatttttggcgttctgtttcattgagaaatatgtttccatcatctgggatatccatagctacattaaaatagatttggctgaaatcaacaaataaagcggtattactttgttttttatcactctcaacagaagttgtaattgaaaaaagctgtcctatttttatattagctccaaaagccatatttacctctttgtaataattaaattctttcattttatatgagaaaacttgcgattgttttccactaaaatctttacctgcatctgtgatagcgtctataactgcatcattaaatgaggtaaacttaggttttattactcttgatttgataggcaatgagaatgcaattctgatttctggttttaaagcatttggatatgcaacagaacggtattctccggtattaatagattcagcttgtaaaacagagcctaaatatgtataagcagggttcaagcttgctatttcataaaattcttgggtggatcttgatagatactgttgtaatgttaaatctacctctttaccatctctaatttcatatattccatcatagtaaagagaacttagtggagcaatgtttgctgtattatttgctttcgaagaaatttcatctaaatcttcgttttcacaagaaaacattacaaggaaaacaattgcaaaataaaaatactttttcataggattaaatttttaatagattatttgatagaatgggctgttgagcagcgaatattcacgagtgtattcagttgcattccacattcgcataggttcgttaggttccataggcatggaacctgtactttcgtaatatgatgaattatagccaacatatatttttgatttaaaatcaatgtttctcattataattctctctgtcttatctgtacaatttgcatttatcataggccagtttttataattgggttcatagttgcatttattttcaaacatacttatattgaagataatatctatatagggttgggaaggttttgtcttttctctatctttataaaaatacaaataaagttggcttgacgaatgataatcgcttttgttggaataatcaggtaagtatgaattattttcacgacttggctttacatataaaggttctatatggatagtattgataaattcagtttcaaccaatccatgtgaattggcataggagaaagaacatgtaataggtacaccatagcttgtttctgtgaattttgaattatatattaaatttaggaaatggctatatcctttaaatgtttgtacggccagattgctatctccccctataattagcactttgaattctgtattttcaaagaatttttcttcttctttattcagagtagttgttttcttactgaagattctatcaaattctttttttatacacgtttctgcgaattcgtatgattcgtctgtttcaaaggcaatgattcccagtcttccataagtcaatgaattcacataaacaggctcatattcactttttccttgaataggttggtcacttaaaggagcaatatccatgttgacggtgaaacttgattggaagaatttaacatacattcctgttgacttttgtattttatccctgtattctgttgaactttcactttttgaagaaaatagttttcttgtattaatatttgttccgaatgcggttttaatttcatcgtaaaagctaaatctcttgtaactgaacatgaatttctgattctgttcgaaatttccatcggttaccatctcaaccacataatcacttaatttagagaaagtgggtgcttctatagttctgctagtgggtttgggtgtattgtgtgccaatgtcattgatactgttatgggttttctgttgctgataaataccggtatataattttggtttgaaatgctatttccttctaaaatggatcctggaaatatgtaatttcttccatataaaacggttgcttctgtacttttcacaatatattgtttattgaaaaatgcatcatcttccggtgaaagtgatcttgatgttttgtcttccagattcttattatattgatttatccaattctgatatagagaatctcctggatatgtatataaagagtctattttaacaatatctttatattttataagactgacattaggggtaatatgggctaattctgttgcttcattgcatgagcagattagcgttacgcctagaagtatgtgtaaaatagaacggatgcttttcataatgatgattatttattgtacattgaaatagttaacaaatacagaattatcttttatgttagaggcggaaaatgatataggtcctccgaaatcatcgggtgtaactgttgaagataaataagtaagtatgcttgtaaaaggattgtctgggttgatatcttttattcctttgtttccaatagtcatcaatctgatattagaattggctaatattgctagttctttttgactaacttccttagacttcagtaaattgtcaatagtttcttgtaatttgtcataatcaatattactttcaataactagtataatttttctgccaaattgtattgagtttataaatgcaagcttgtctaattgttgcaaaacttgtggatcagtgcttagtgattccggcatatccattataatgctgaaaaaactttgatttatatctatcaatataatattcttttgaggcttataatcgggtgtgatgcctaatagttgctgaaggttaatattttgtccccaattgacagctaattcttggtatgattttatctttttaattacgaatgaaaaagaatagttacttttcaaaacatcgtttgtttttaacgcttcatgaatagctttcatcatgttattataggaaggagtgattgtttgtgactttataggaatggtgtaccccatgtttataggattcattgatattttcaggaacttatatgtgtcttgattgatgctgttggcttccaatattgctcctatgaatatttcattggggcattttgccacaaacttatctgcactatattgctcttcttggctataagcaagtttagcaatcatcaaaaatacgatggtgtatattattttagttttcatttctttgtatttaggttttatactcatatttattcaaaggtatattttcttttcagccatataatggaaaggaaatcttgattcattagttctgaataagagattagattatactcttgtcctattgccataaatgtacgttggtcattattgttttttattatatagaatcctatattgagtattactcttccattttcgtctttttctccacagtattcccatttatctattggcttctggtatatgaataattttttatcttgccattttagtttatacttttctactatattattggtttttacaatggaaagggagtccctatcgaattgtaattcatgggggcaagaccgttggattcgttctccgaaatatgcagtttctgtttctgttaggtcttgaatatcgtttttattgagtatttctttaaattctactttttcagaaaactttagtttcaatatgtaagaagtgtcttccggtgtgggaagaataggagagggatcgtccttgtctgcgcaagaactaaacataagtgttcctattgaaaggagaaaggacatgcctacaataagtagagtgctttttttctttttcataatattggactttagttttcgtatataaattctcctgccaatattcccttttcatcggtgattgtcagttcatatattcctgccggaatattctctaaagaagttgataaagaagaattggagtggggtatatagaggtttctatatactacatatccttcttttgatttaatctcgatggttaccgcttcccagtcctgtgcgaattcgatggttaattctttattgcagtcgtcaaagaaagcttttaccggaatgaatgactctactggaattctatggttgccatgttttataaattctatatttcgctttttagcgcataataatagaggaataattaaggctatcaaagccaagcttatttttaatttgttcataatcgttttacgttttagttttgtacaaacttaggtattataggattatgaatgacaaaaagagggagttatagtatatacaagatttgttgattatcagtgagttacagaaattgttatatacagtgatgtatatgtagtgttttataattcactgataataagacctgtatgagaactatttattttaagaggtttttgatgatgtaatctcgtaaaaacgtttctttatcgtgctttagttggacctcttgataaattctcgttcgtttcattcgtacagaagccggattgatgccaagcaattttgcttcatcatttgcgtcaaatccaaaaatatggagatagcaatattgatattctgattctgtcaggttgggaaatgcctcttttagtagggagtaaaattggggatatatcttgtctacttccgtcattatggaatgccatgttttgtcagtagggagttgggagtcctcaagcctattttttttagtcaaagaaataagcttcttgccaactgtggatgtttccagactttgcttttgcagccggttgtatttataggatattacttctatttcctgttgtagtttgtgggcattattctctttgtctgccaatgctttttgcaaaatctgctttttttcttctagttctgcagataagtgaaggagctctattttcatcttatctagaattgtttgctggtaatagattttggctttgcttctctgccggtaaatgatatatcctgcaactgatagtaagaataaggagatggcaataatgatgatgattgtattcctttgctgtgtaatctttaatagttcgttctcttcccgtatcttggcgttgttatactttttttctatttccaatacttttgtctcattttgaactaatgtcagtgaatcgagcatgtcggaacagatttctttgtaatggagtgcttccttgtattttccttctgccttataaagcaggtagtaagcttgattgaagtaataagcgagatcattgtgtttggttatcgtttcaatccattcgtgtgcttttgccagttggttgtcttttatatatatgtgtaatagggagatagaatccttatagctttctttgctgcccgtttcaatggcttttaagaaatatctttcggcattcttgtatttttcttgtgcctcatatatcactccaaaagcattggctacatcagctgttaaatctttgttatgcagtagttgtgagatggaatcagccttttgaagtaagggtatggtgcaattaaaagaatcagtgagtgtacattcacacgctaaatcttttaaggcgtatgcatagcttttgtagttccttgctttcttgaagaagttactggcctcttttcttttctccagacgttcactggttatatctctaaaaccatacaaatctgccatataggcacaaatataccctgccacattataggcctgatgttctttggccagttgcagcgcatcggcatatatttgcattgcattgtcatactccccatcttctacataagcacggcctagatacaaggctatttgcgcctgttcttccggtgtaccgtgtttcataaaccattgttgtgcccgttgccattggtagatagggagtaatccggtggctgcttcgtccgtcactttaccgcataacatacaccagtgggcaaagtccttatcagtcagttcatcgggggcatttatgttgttcagtagcacagaagcactatcggcatacatgggaatcagttcctctacagattgtaatagcggaagtatgcttttctcttttctacatccggggaggatgagaatgaatagtagtcctgtcaaaagtaaagctttcataagaatgtgtttatattttgctaatatagtgataaatccggacaacttgtatttgatagagggaaaagtcagttttttatgctttccgtggcttctcctttggaagtgaggtgggaaagcatgaaagctctttgtcttgtcagtgaaatctgtctgttgttttttgttcttctgccttttcattaagttttatcactaaagtgaagaaactgtatcactttagtgatgaagtttgattaccttagtgatgaaagttcatcactaaggtgaaacgattaaatgaaaaggcagagattgggagaaaataccgatggaaccactcaagttacaggaacggaattcattttgtttgcgccatttataacggttgtaatgttgtgctttctattgaaatatcctatgacaaaatgatgaagaatttatgaataaatcaatcatggtaaataattggttatcaacacttaataagtaaatgaagaatttgaaggaaataatcagccaactggatactgtaactccttgtgttttgaatccgttgtttttacgccacaaatcttctggtccatttgcatgcatacatccctctgaccaccaggtagctgatgagaaaggctgttacggccatgcaaataatgtgtattatggcaggaatcccctgaggcaacagcgaggcgaacaagtcatatcccatttgcacgaagacgaaatgacacagataaatgccgaaggtcatggatgccacttttgaaagaacaggcgaagaaggtattttaagcttctgtatgcagacaaaaacaggaaatgtcatcataaatacattgatgcctccgaaaagccatactatttccagataggcgtagtttcccggaaaatattcctgcatgatgaggtagccgccgaaagtgatggcgtaccctgtcacaaacatagggataccgatagccagggtttttctccaactccattgcagcgggtattttaccagataatgggccagtatcagatagccaataaatccggaaacataataaaatgagccgaatgcattccagtcgcacactcccaggatatccatattgccccagttgccgatatatcccagtgcgggagcggccatctttatgtagggaaggaacaaggagatgccccagatggaaagaaatagcttgatatctttccgggtagcacgctccagccatgcatggaagatggggatgatgaagtagagccccaccagcatatacagataccacagaggagtggtgtcatagttgaaattgaaaatgaatgtccaaatcttcgtgatagtcatttccagggtgaaggcggacatgtctatggtaggattgtctgtcgtggtgatgtaattcagataaatgaaatacaatacaggcagcatgaccgaccagaagataagcgggacaacaatgcggccgatccgctttttgtaaaattcactcatgccgtttcgtacaggaaacagcagcactcctgtcatcatcacaaacaagggcacgcaacagcgtacggcacttcccaatgcgcacccttgcagaaaagtaggacggtctgtgtcaaaacgtgccacaaaagggtcacagcaatgggcgaatacaactaaaaaacaggcggtgacgcgtagcaagtctatccatccgatgttctctcttttatttatttccatattttctgttgggcttatttttgttcaagcactattactaaaggacggtgatctgatgctaccggttcatttactacctgtgcggaggttactgtgaagcctttcatgttctgtttcagtgctgtaatataatcaatggtttctgtaggggcgggagccggaaatgtatgctggtttacgtcagaaagtatctgaaaatcctgttgcaagtattttatgaatgcggattcgggttcggcattcaggtcgccggccaggaaaaaaggttttttatgagcggcggcaaagtcttttataagctccagtgaggccatgcggtcttcttcggtgagagacagatgggtgcaacaataaatgtagttgtcgaactctgccataatcagcgcacgtgcttcttcccgtccgggaagtgtcatggttttcaggctgacgggaatttctttggtgagaagtccgataccatattttcctccgtcgtaatcaatggcaggggcaaagtaagcgtgcatttgcgtacgtccggctatctcgcccagtacgtatttttgtccgctgcggtgggtcatgctgtctagttcctgcaaggctaccacttcggggtggatatgattgattacatcggctatgcgttggaagtcgcatacatcatccattccgtttgcatttttaatgttataggtcattagccgtaaggaattttgtgattgtgccgacagggcaaaaagaagggtaaaaagtaagggcaatgtctttttcatatattcatcaggttttgattgtttaaattctctccaaagatagataaattcttattgtcattttcatattcttgtctgaaaagtatgtattgataaatacttttatataattattttttcattttgctcctttataattatatcaaagggattatctgtcagtttactttttatccatgcgcaaaaatcaaaggtttttaataacggcctttcatatttgtcttcttctattttttgtatattttgttgatagtaactccaaagcttatttctatactgtttgcttttgggtaatggataggattgaacgaatttaaaaagaagcttctctgtgatatattgttttgtttcgaaagaagaactccttttaattgactttatttcattctcaaaataatcataattccctaattcagcttgtaaaataagattgactagtcttgctattctgtaagtagggaatatatagagggatttaccggaacttaatatcttcttcatatttttacgtgcttcttttaggtctttcagacctatatgtagaataaccagacttagatataattgtaactgcaaattcaattctaataatgaaatctttttgaagatgggctcctcattttgttgttgtaattcttgtgcggatttgaagttccctgtattgaataagctgtaaaattcatacaggtagatgtagacctgtactgttagcctgaattctgctgaataatctcccttttccatttcttttagtctggaaatgaagaagggcatctccttgtataatccgacggactgtaaactgtccagtactcccaagatagcattcagataatacaaaggaggatttagaatcatgtgtttgttttcatcgaagagcaagatcaaatcttgatataagcgtatggctgccttgtaattaccggaattgaggaaataggtggactggaaaagtagatgtagtttttctgtttcaaagcctttatatgaggagttggcaatgagattcagctcacttagcaccagatcgtttaagttctctttttgcttgtcggaccggatgcagcctttgtaggtgaaccggtatttaagtatgtcatataattgggtatgaagattggcactgcgggtatacctcattatttcatttatcttcatttgtttgtccaccacctgtttttcgctcatacccgtaaagtcatacatactgagatattttagttctgtgcggcgtatcaatagtatcaatgagtcattttcataatggatagctagtttttccgctttctcaagttccgataaggcttcatttagcagttctctttcaaataagataccggcttttgaaatataatcaaaaatttgagtctggatatcctgttgcttattcaggtgaactaaacaattaagtactactttatatagatgcttgactgccatatcgaaactttttcctttttgttttatacagaattgcttgtagatatcatctatagaggtattgttctctaataattcaaagagaataagatagcctttttctccattttgcagattgctgtatagctttaaatatcgtttttctgcttttgatagggatttaatcagagcaagtagtgagatggctttattcataaagtatgtaatatatgtcttttcaaatataggtattatctatgaatatacaagtggtgaaagtattaaataagcgtatgtttttatgttataataataatcctaaaaggatattcttttattgattgaatatataatcatttgataaatagtaaattatatattgttaaaagtaagataattctatatgtgtaatgatggctagcggcactttatggctcaagaagttttttgtgctcagaaatatagaaaaagaaaagggcgtctatgtgatttattatgttagttaccaataatatatgatatagtgtagtatagaaaaattagataaataacctgtttgggattatcaaaacaggtaaataatggatgttgttttatgattctatccatctatatttgcaatgcgtcgaagtaataattatctatatccggaaatagaaattagattttgatgcataaacctttattaattaagatctattatgaaacacagactttctaatttatcgaaaatctatcgagatgacatttgtcgtaagatgaatattctgccgatagtgttatgtatgttttgtatgggcaatgcatactcgttgatggccgcaacaccatcagtcagtgaaactcttcagcaaaacaggaagatcaagggtagagtggtggatgtaaacaatgaacctatgattggtgtaagtgtgttggaaaaagggacaaccaacggagttatcactgattttgacggaaacttcacattggatgtccgaggaaattcagctgttctcgtatgttcttatatcggttatattactgctgaaatccaggttggaaaccagacggacattcacgtacaaatgtctgaggatgtaaaaacaatagacgaagtcgttgtcattggttatggtaccacaactaagaaggagttgacaggctctgttacttctattggcagggatgattttaaagccggtaatataagtaatcctatccagctgctacaagggcagattgcaggattgaatattgctcgtccggatggagcggatcctacggggggatttgaaattcagctacgtggtttgactacgatgaaaggaggatcggggccgctaattgtgattgacggcgttgaaggtggaaatcttgccaatttgaatgccaatgatattgaatccattgatgtattgaaagatggttcggcagctgctatctatggtacccgtggtaccaacggcgttattcttgtcactacccgcaaaggaaagcccggacactctttgattgagttttccagttattggactactcaaagtgttacaagaaagccggaatttctttctgctgatgagttccgttctactttgaaggaatatctccccaatcaggctgctacattggattatggagcatcaacggattggtttgatgaggtcactcgtgacactccccttagtcagtattatagtcttgcagcatcaggaggctcggaaaaactgacttatcgtggaaatatttcctggcatgatgataaaggtattgtgcgtaattcgggaaacaaacaattaagaatgcgtttcaatgtgtcacaaactgctttaaatgaccggttaaagctggattacaatatctcttattctactgccaaaaagaatttttcaggatatgaagtgatgaagcaggcggtaacacgcaatcctacggaaccggtatatgatacagaagggagaactccgatttccggcggttactattataatgatggtccgtttaagtattacaatccggttgccatgcaaaatgaatcgactaatgagacattagaccgtgagttctcgggaagtgtacatgcgtcattaaagattattgatcctttgaaaatcaatgctttggcttcattggtagaaaccaatactcggaatgggtattaccagacccaatattatccaattgatttcggtactaatggccgggctaccagcacgaattctctatcaagcagcaagcagtttgaagtgaatgcagattttaaccactcttttggcgaccataaaattcaggctattgctggttattcgtactatgattattggaatgaacgttattatggtatgaattatggatatgatactgatattttttcattctataatatgggggcaggttctgcgttgtctgcaggtaaagcatcacttaccagtaataagcagtccaataaactaatttcatttttcggtcgtgtcatgtataatttcagcgataaatatttgctttctgcttctgtacgttatgaagggtcaagccgtttcggggcaaataacaagtggggtaccttcccggctgtcagcttggggtggcgcattacgcaagaagagttcatgaaaaagttcagatggctggatgacttaaaattgcgtgctggattcggtgttaccggtaatcaggatattgataattaccagtctttgtcattgcttacattcggttctcgctttttgtatgatggaaagtggactagtacggtttacccgaatagtaatcctaatccagacttgaaatgggagaaaaaagaggaattcaatgtgggacttgattttagtgtgctgaagggacgtttgataggaaccattgattattatgtacgtcatacaaaggatttgctgaattcatatacagttcctgttccccccaatttgtatgatacgatgttcgccaatgtaggtcagataaataattcgggtattgaaatttcgttgggcgcatctccggttgtgactaaagattttacttggaatctgaacctgacatttgctcgtaataccaataaactggctagtttctccaataatgaatatgctatggtacagatgaataccggttatttcagtgaagacttgaagacgtatacacaacgtattgtagaagatgagcctatcggtaatttctatggtcctaaatggttgggatttgatgcaaacggagataatatttttgaagatttggatgatgacgggaaattatcggatggagacaaccaggtaattggtaacgcttatcctgattttactttctctattcagaattcattttcttataaaaattttgatttgagtttcttattccgtggctcagtaggaaatgatgtattgaatatgagtcggttgtattatgaaggattcagctattttggtagtaataatattctgaaatcgaccttagaccatcccgaatataaaggtggagccatttattcttcacgctttattgaagacggttcttttgtgaagcttgataaccttacgttgggatataatgtgcctttgaaaggtaaggttatttctaagatgaggatttatgtgaccggtcagaatctgctgactttgaccaaatataaaggcatggatccagaagttcatttggcaggtttggaaccgggtatcgaatggtatactttttatccccggactaaaacttatctgctgggcttaaatataacattctgataattgatggattaacctgttaaattgtatctcatgaaaaaaatagttatatctgctttgttggctgtatgtaccggcaattgtttccagtcttgtaccaatctggatgaagacgtttattcatatattcaaactgatgatttctttaagaacgagcaggagatggtgatgaatattggacggatttatgattatatgaaacaatatactcattattttaatatgtggggggcactgactatcagtgctgatgaggccatttgtccgttccgcgagggcaatctttggtgggataatggcgtgtggattgatttgcactcccataacttccattcgcatgtgaataacaatgcttgggattttatttttggaggggtggccttatgcaatcagattctttacatgattgaggaatctccagtggattttgcttccaaacccaatttgattgccgaagtaaaagtaatgcgtgcgtggttctatatgaatggcattgatttattcggcaacataccttttactgataattttaaagatgagggattaccaccacaaaaagaccgccaattcttgttcccgtggattgaaaaggaactaaaggaaaacgtagaagcccttccggctataccggctaccagtaactatggacgaccgactcaggctatggcatatacagtattagccaagctctatattaatgcggaggaatggattggtaaagagatgtggcaggaaacagtaaatgtttgcgcgaaggtaagaaaactgggtatgacactggagtctgattattttgccaatttcaaagttaataacgagaattcaaaggagaacattatggtagtggtatatgataatgtccaaacttcgggtgattggacttataatttcaagctacatcaggaaaccttgtatactctgagccaacaaacatttggtattgttgatttttgttgggatggtttttgtgtcactgagtcattgtataatagctatgatgagaatgatgtacgtagaaaatcatggttggcaggcccgcaatatgataaaagcggtaatccgctgatgtatcgtggcgagccgttcagttataacgtcagtgttacttctttgtatgatccacagaatccggctaaaacggaagatggtgcacgttgtgcaaaatatgaatatgaagatggtttgcagggctctatgagtaatgattttgtgatttatcgttatgctgatgtgttaatgatggaaggtgaggcattggtacgtatgggaaaagcaaccgaagcgcttccgttatttaatgaagtaaggcggcgggcaggtgtagctgaatatacagcaagtcaattgaccctggatgaaatcttagcagaaagagggcgtgaatttgcatgggagggattgcgtaggcaagaccagattcgtttcggaacatggggaaaagcctgggattttaaagaaccctcagaggattacaaaaaactgttcccgataccgtattgggcgttactttctaatcctaccctacaacaagaaccaggatatactaattaaaaaaaatatatgatatgaaacaacaaaaaatattggttgtgggcagtgcaaatactgatatggtgattcaaacagatcatcttccagtattaggggaaacaattttaggtggaactttttttatgaatccgggtggaaaaggggctaatcaggctgttgccattgctcggttggggggaaagattactttcatatgcaaaactggtagagatgtttttggtcatcaatcacatcaattatttgaggatgaagggattgatacttcgtatattttctcggattccaaatatccttccggtatagctatgattacggttgatcataaagctgaaaattgtataactgtcgctcccggtgccaatatgaatcttactcctactgacttggcaaaggccaggtctgctattgatgaggcggatattattctgttgcaattggaaattccgatggaaacggttgaatatgtagccaaagttgccaaaaagcagaataaaaaagttattttaaatcctgctcctgcccaacctttgtccgaagaactattaagtgctctttatcttattactcctaatgaaacggaagcagaacttatttgtggacagaaaatcacggatattgattcggttaccaaggctgctaatttgataaaagctaaaggggtgaagaacgtaataattacgatgggatcgaaaggagcgtttgtttgtactgacactatttgtgaattggttccgtcctataaagtgaaggctgtagatacaacgggggcaggcgatatttttaatggagcattggtgcttgctatttccgaaggtcgtgattggatagaggcaactcgctttgcttgtaagacatcggcaattgccgtgacaagagtaggtgcacagtcatcagcaccttatagaaatgaagtggatgtgtttaaccctgaaaaatgaaaaacaacatgaaaaagaatgtactattatgcacttggttatttttatcagcattggctggtatggcttgtacagataagcaaaaccgggcggttcctgttgaagtaacaatgaccaaggctaagttatttgataagattaaaggaggatgggctggtcaaacaataggttgcacgtatggtggtcctacagagttcagatatccggggacaatgatacaagattatattcctatcaattggccggatgggtatattaaatggtattatgaaaatgaaccgggtttgtatgatgatgtttatatggatctgacctttgtggatgtatttgaccgtttgggattggatgctccggtcgattcatttgctgtggcttttgccaacgcaggttatgtgctgtggcatgccaatcaggctgcacgttacaatattctgaatggtattatgcctcccgaatctggtcattggaagaataatccccatgctgacgatattgactatcagatagaagctgattacgcaggtttgatgagccccggcatgcccaatacagcatctgaaatttctgataaaataggtcatattatgaattatggcgatggttggtatggtggtgtttatgtgggggctatgtatacactggcttttgtttccgatgatatagagtatattgtaactgaggctttgaaaacaattccacaacagagtctatattatcagtgtattaatgatgttattcaatggtataggcaatatcctgatgactggaagcagacttggctggaatgtgaaaagaaatatagtgaagacaaggcttgccctgaaggtatctttgttccatttaatattgatgccacgattaatagcgcttatattgtaataggtttactgtacgggcaaggtgattttgccaagacaatggatattgctacccgttgcgggcaggattcggattgtaatccggcatcagctgcaggtatattgggaactatgctgggatatagtcatattccggaatattggatgtctaatctgaaagaggtggaagatatggattttgcatatactaccatttcattaaataaagcttataaaatgagttttgaccaggctttacaggttatagaacgtaatggcggcaaagtagaagcggagagcgtaacaataaaaactcaagctcctaccgcagtccgttacgaaaaatcatttgaaggactttatccggttgaagtggttgcttatgggcgtggtcagggaaagactttaaaagaggttggagatctcacttttgaggggaccggactgattttagctggaaatgtcagggcgaaagatgagagttatgtggcagtgatagaagcttttgttgacgatcagttggtagaaactataaaattgcctgcatcttatcgggtacgacgccatgagttgttctggatatatggtttgcctaaaggaaaacatacagtttcctttaaatggttgaatcctgtcgaggatgcggatatacgttgtagtaagactattatattctcggatgctccacgcataaaccagcgttaattattgaatccattaaccatttaagacactaatcttatgtttattatacaagattattccatagcaatattattttgctttgtgacaatgctttgttggggatcttggggaaatactcagaaactggcggcaaaaacatggcgttatgagttcttttattgggactatgtattaggattgttacttttttctattatttcagcttttactttgggaagtataggtgaggaagggcgtggttttgttgcagacctgacgcaagcggatacaggcaatatcttcagcgcatttttgggaggagtaatatttaatgcctccaatatccttctttctgctgctattgctctttgtggcatgtctgtagcatttccgctgggagtaggattggcattggtgctgggggtactgatcaattattttggtgcagctaaaggagagccactttatatttttgtcggtgttttattgattactgttgccattatactaaacggctttgcttataagaaagcacagacaggacagaaaaatcttacgacgaaaggcatctttatatccatagcggcaggggtgataatgtcttttttctatcgttttgtggcagcttccatggatctgagcaattttgctttgcctgaagttgggaagttgaccccttatactgctgtatttgtttttgcgctgggagtctttttaagtaattttattttcaatactgttgctatgaagcatccggtagaaggtaaaccggtttctatgaaagactatttcaaagggacaatgactatgcatatggtaggcatactaggtggtgttgtttggtgtgtaggacagtctttcagtatgatagcctcggaaaaagctggtgcggccatttcttatggacttggacaaggggcaactttagtttcggccttatggggaattttgatttggagagaatttaaaggtgctccaaaggtttcgaatcaattgaatattgcgatgttttttctatttattataggattgggatttttaatatatgccggagcataggttgggtaaaatttaggttaggttgtaaaataggttggttgagagtaggagggtgttcaaattggggataccctcctttaccgtttccctttatttctttcctgccggagaagcctgtgtcatacggatactgcttaccacacctgcggcaatggcaaagaatatggctaataacaaacaagcctgcgcccgatgtccttcggcgaatatacggaacaacaaagcaaccaatgtggtccccaaagtctgacctaacagacgcgccgtacctagcataccgctggctccaccgcttctatgagtgggtgcggaagaaacaatggttacattattgggcgtctggaacagcccgaagcccataccacagagtgccattcgccagatgatattccattctgccggatgggtgggaagcaaatagagtgtgaataggccggtagcgaagatagtcatgccgatacctcctagcaatccgggatgtactttctctaccagtctgcctgcaagtggtgcggtcaagatggtagccaatggccagggggtaagtaacaaaccgatctctacggcgctgtatcccaatatattctgcataaaaaaaggtaaggaaaccatagccagcatctgggcggtgaatgaagtgatggaagtaccgatagaaagagcgaaaataggaatcttcagcaaatctacaggcaggataggggttgtttccttcagttggcgacggatgaaataagtgccgattatgattaacaataccaattgtatggcaatgaattttctgttttcagcgtgtgcaaaaccttccaaggtataaattaacaagccgaaagtcaatgcgttggctattgcactgattctatcaaacttatgttttacatctgaagccggattatgcggtaataaccgatgcccgattactaatgcagccaatcccaaaggtatattaattacgaataaccaatgccagcttcccaatgtcaggatactgcctgcgatggacgggcctgcagcagccgaaacagctaccaccatggcatttacccccattccgcgtcctagtatctgcggcgggtaaattaaacggataagggcggtattgacactcatcacacaggctgcaccgaaaccttgaatgatacgggaaacggtcagcatccagaaagagtccgagagggcgcaggccgcagaggcacccacaaaaatggagatgccggtcaggaatattcgtctgtaaccataaatatcacctaatgaggcaaatgatagtaaggtcatggtaatcaccaattggtaggcattaataatccagatggcattggcgggggtgacatcgaaatcgtgtgccagcgtgggtaatgcgatattcataatggttccgtccagtacggacatcatgatagccagcagtacggctaccaccgcaaaatattgtttaggtataaatgcgatcttttctttgctcatgatgcaaaattaacggaaatcggccagattaggtttaatttcttctaaataattacgattccaatgttaaagaaccgggaatttatagaatggttaaggaataatgcttatctttgcagccgttaaaaacagtggagagatttgagtagcttgcaaccacagaaaaaaatgctaaaaaatacattgactttcttatttacatctatctactctgataacttcccaaggtggttaacgaattaacttttaatttttaattcttaattttcaaattagaatgggatatttattcacatccgaatcggtgtctgaaggacaccccgacaaagtggccgatcaaatatcggacgctgtgcttgacaaactgttggcgtttgaccccagttcgaaagtagcttgcgaaaccctggtgactaccggacaggtggtactggctggagaagtgaaaaccaaggcgtatgtagatttgcagcgcattgcacgtgaagtgattaaccgtatcggctataccaagagcgaatatatgttcgaaggaaactcgtgcggcgtattctctgccattcacgaacaaagtgcggacattaaccgtggcgtggaacgcgaggaccctatgaatcaaggggcaggcgaccagggaatgatgtttggttatgctaccaatgaaacggaaaattatatgccgctgtcgctggacttggctcataaactgttgatggtattggccgaaatccgtcgtgaagggaaagtgatgacttatctccgtcccgacgccaagagccaggttactattgaatacgatgataacggcaaaccggtacgcattgatacgattgtggtttctacccagcatgacgagtttgtaactccggctgattcttccaaagaagctcagttgaaggctgacgaagagatgttggctaagattcgtcaggatgtgattgaaatcctgatgccacgtgtcattgccgaaattcataatgaagaagtattggctttgttcaatgaccagatagtttatcatgtgaaccctacaggtaagtttgtgatcggcggtcctcatggagataccggtttgacaggccgtaagattattgtggatacatacggtggaaaaggtgctcacggtggtggggcgttctcaggaaaggaccccagtaaggtagaccgcagtgctgcttatgcagcacgccatatcgcaaagaatatggttgctgccggtgttgccgatgaaatgctggtgcaggtgtcatacgccattggtgtggcccgtcctatcaatatctatgtaaatacgtacggccgcagcaatgtgaaactgagcgacggagagattgctaagaaaatagaccaactgttcgatctgcgtccgaaagccattgaagagcgtttgaaactgcgtaatcctatttatgaggaaacagcttcttacggtcacatgggacgtgagccgaaagtagtgaccaagacatacgaatccatgtatcatgaagcaaagacgctggaagtggaactattcacttgggagaagttggattatgtggataagataaaggaagcgttcggtttgtaagaaacggattcgaatatggtgatgtatacgggcgaattcaattcgttcctgcggcaatgagtgtcattggccggcaggggaggattggatccgcccgaaaacataaggatttatatgaatgatataaagaatgtatgtgtatatagtgcctccagcacaaagatagcaaaggtgtattttgatgtagcggaagaattaggacgtcttttggctgaaaagaagatcaatctgattaacggggcaggctgtatcggcctgatggcggctacttcagatgcaacattggaggcgggcggtacggtgacaggggtaatccctcattttatggtggagcagggatggcaccatacagggctgacccgattgattgagacagaaaccatgcacgagcgcaaacggatgatggccgatttgtccgatggcgtcattgcattgcccggaggttgcggcacattggaggaattgcttgaaatcatcacctggaagcagctgggactttaccttaatccgataatcatcttgaatatcaatggattctatgactctttgcttgaaatgctgcaaagggcggtggacgagaactttatgcgtaaagaacatgctgctatctggaaagtggcctcaacagccgaagaagcaataaatttgctttatacaacgcctgtttggagcaaagaaatacgtaaatttgcagcgatatgagtgaaacctgccatcccggaatagcgtatattctccaactttatacggaagagcagagccgtgttgatacggctttgacacacaacgtgtgtcatacgtccaaggaagacgggatgagaggaatggagttgccctatcaactgcgttcggactggatggtgaccagcgtgttgtttctttgttttattctggtatcatacgtgctggcacatggcaagaaacaccttgaacagcaatttaagaattttgctttgtctaaagagcgtgccagtttgtttgatgatactactgcatctgatgtgcgttatacattggtgctgatattgcaaacctgtatattatccggtttttgtgtgtacgattatttttctgatcacgacctgctccttttccgtacggttcctcattatttattgctaagtatttacattggttatatagtttttttctttgtcatcaaatggattctttatagctttgtaaattggattttctttaacaaaacacgcaatattatttggctggaatcttactttaatgttgtaattggggccggatttttactttttccaattgtacttttgattgtgtatttcgatctgtcaccacaaattgctccttattttatcggttttgttataataattgctaaaattctgctgttttataagtgctttagtaactttttcaacaaatttcatggcgctttccatttaattctgtacttttgtgcccttgaaatactccctgattttgttctgtggaaagggattatcttagcgaacaacattttggttttaaatttttagtacattgaaaataaaaaaagtcctcgtatctcagccgaagccgacttctgaaaagtcgccatattatgatattgctgagaagtacggtgtgaaaattgatttccgcccgttcatcaaagttgagagcttgtcggccaaagagttcagacagcaaaaagtctctattcttgatcataccgctgtgatttttacatcgcggcacgctattgaccatttcttcaatctgtgtgcagaattgcgtgttactgtgcccgaaacaatgaaatatttctgtacgtccgaaaccattgctttgtacattcagaaatatgttcagtatcgcaagcgtaaagtattcttcggcgcgaccggtaaattcgcagatttggtgccttctatcgtaaagcacaatacggaaaaatatttggtgccgatgtctgatgtacacaatgatgagatcaaaactttattggataaaaataaaattcagcatacggaggtagtaatgtatcgtacggtaagtaatgattttactcccgaggaagagttcgattacgatatgctgttgtttttcagtcctgcaggaatcaattctttgatgaagaattttccggagttcgaccaaaaggaaattgcgatagggtgttttggtcctgctactgctaaagcggtaaaggatgccggattgcggttggatttggaagctcctactgtagaggctccgtccatgactgcggcattggatatgtttatccgcgagcgcaataaagattaatttttagtttatatcccaaaaccgggggttttgtatcaataaagttgtaactttgtgattcgaaaccctcggtttctttattttaataaaagaaagaagattatggtagaatatacactcggtaaaaaagagcgtttgaatagtaagacattgattgagcgtctttttttaggtggaagcaagtcttttccggcttttccgctacgtgtggtgtatatgtcggtagagcctgtggaggaagatatggcggcagcttctattctgattagtgtgcccaagaagcggtttaaacgtgcggtaaagcgtaatttggtgaaacgtcaggtacgtgaggcttatcggaagaacaagcatttgttgctggatgcgctagcttcccggaacaaaagactgattatcgcctttatatggctggataaccatattcattcttctgcagaagtggaggagaaagtgaagaagttgctgtttcatatagtggaaagattggaatgaaaaagatactttcctatctgttgctgttgcccgtttatttctatcgggggtacatttctccgatgactcctccttcatgccgttttgtacctacctgttcggaatacgctattgaggctattaaaaaacacggaccttttaagggattatacctggcggttcgtcggatattgcgttgtcatccgtggggtgggtcgggctatgatccggttccgtaaaatctgttgttcctatgttgctggatattcatacacatcataaagagggcattccgggagaaaatattctcaatgtagaacccggactatttgagcctgcggaaggctgctactattccataggtattcatccgtggaaggttttggaaactgagccggaggattggaaacggctggaggatgcggctggccatccatctgttttggcaataggggaggcaggtctggataagttggcttcggctgatatcttgctgcaaaaagaggtgctaatccgacaaattttattgagtgagtcagtaggaaagccgttggtgattcattgtgtgaaggcgtttaatgagctgattgagttgaaaaagcggtatcggccgcagatgccctgggtggtacacggtttccgtaataatttgaatattgcctgtcggctgatgcaagaagacatttatttctccttgggggaaaagtatcagcctgatgtgctgcagaatgtgcctttagagcgtttattggccgaaacagatgaaagtccgctggatatccgcacggttatcgggcaaatggcagaggcgaaagatgtggcagtctccttgttgtgtgatagaataagtgaaaacacacggaaaatcttttttcagcgataagagttgtttcttcagataaagagtcgtacttttgtggcattaaagtataaatcaaacatttaaatagataatcattcgatgaattttgtagaagaattaacatggcgtggaatggtgcacacgatgatgccgggcaccgaggagttattggctaaagaacaagtaacagcttatctgggtattgatcctacggctgattctttgcatatcggtcacctgtgtggtgtgatgatgctgcgtcatttccagcgttgcggtcacaagccgttggcattggtgggcggtgcgaccggtatgattggtgacccttccggcaaatcgcaggaacgtaatctgctgactgaagaaacattgcgtcacaatgtggcttgtatcaagaaacagttggctaagttccttgactttgagagcgatgctcctaacaaagccgaattggtgaacaattacgactggatgaaggactttactttccttgatttcgcccgtgagataggtaagcatatcaccgtaaattatatgatggctaaggattctgtacagaaacgtttgaacggtgaggctcgtgacggtttgtcatttacagaatttacttaccagctgttgcagggatacgatttcttgcatctttatgaaacaaagggctgcaaacttcagatgggtggttcggaccaatggggtaatattactaccggggccgagctgattcgtcgtaccaatggcggtgaagtgtttgcattgacttgtccgttgattacaaaagctgatggtggtaagttcggtaagactgaatctggtaatatttggttggacccccgttatacttctccttataagttctatcagttctggttgaatgtaagtgacgaggatgccgcacgttatataaagattttcacgtcactgagtcaggaagaagtggaagtattgacagcagaacatgctgaagctccgcatctgcgtgtattgcagaagcgtctggctaaggaagtgactgtgatggttcattcggaagaagattataatgcggctgttgaggcatcaggcattctgtttggtaacgccacttccgaagcattgaaaaaactggatgaagacacgttgctggcagtgttcgaaggtgttcctcagtttgaagtgtccaaggatgtattggccgaaggggtgaaagcagtagacctgtttgttgataatgccgctgttttcgcttcaaaaggtgaaatgcgtaagcttgtacagggcggtggtgtttcgttgaataaggagaaattaaatgcctttgaccaggtaattacaactgctgatctgctggacggaaaatacctgctggttcagcgcgggaagaagaattattatttggtgattgccaaataagaaaaaagagaatttcttttatagataaaaataaaaaccggaaggagaaatgataggttttcttcttccggttttttgtatcttttttctccttatttcccgtctatctctttcaacaactcgtctaccgcagctttcaactgggtatcttcacctttcactactgtttccggtgagttagccactttgatatccggctccagttgtgagttttccagatagcttccatccggcaagcgatagccgataacaggaatgccgaataccagtgtcggatcttgcaatgtttcccaagatacgctggtcatggttcccggtacaggcatacctaccagtttgcctattttttgatggctatatacccatggagtgccatgtgcgttgctgtagttagcctcgcactgcaccatgatactcggtttgttccaacggcggctgggcatatcgcaagcttcacgtccacgaactacttgtgtaaagtatttctttccgctgaatagaatctcgatatcctcgtgcaggcgtcctccgccattgaaacgggtatcgatgacgataccttcacggttattgtacttgcccagaatatctgaataaacggaacggaagctgtcatctcccatggattcaatgtgcacgtatcccaaacggccgttcgaccatttgtctacatcggctgcccgttgttttacccagcgtgcgtaaagtaagtcattcaaagcgccattgctgataggaacaactacttcttcccaacgttctttggtctgcgggttataaagcgtaaccagtgttttctttctggctttaccgttcaacagaatagagtaatcgctttcgggagtgatttcctgaccgtcgatcttttcaatgatatctccggctttcactttggaacgggcgtggtcgaaggggcctttttccactacctcagaaatcaacagacctttgccattatgattccagtcatacaataatcctaaggtagcggtggcatctcctttcaggcgcggacggtaacgtcctcctgtgtgtgaaacgttcagttcgcccagatattcgctcaacaactccgcaaagtcataattattattgatatgcggcaggaacttgcgataggctttggtcatagtatcccagtctattccgtgcatgttcaggttgtagaagcgtttttgttcttgtttgtatacgtggttgaacatatagtcacgttcggctgcgaggtccatcttcacgtgggcttgatagctgatgggtttcaagctttcagaattagtacccattttctgcatcgtgttgctacctagcaagaataagttctttccatccttgtccatttccatgttggcccatccggcatccattttatggagtaacttggtgtctttcttgcgcagattcattttccacaggtcatagccgccttcgaaggcagagaggtaatataaggtttcaccgtcttttgtgataatggcgctccccaaatcggaagagttgggagtaaggcgtacgatgcggtcctcgatgttgttcagttccaccacgatgtcctttactttttcctctttcttctcttcggatttttctttgttatcacctttctttttaccgtttttcttggtttcggttgtgttcttttgttctttttccagttctttttgcaattcgtaatcttctttgctcaggcggaacttgtcatacgcatcttggttcataaataccagcatcacatcgtttagtgatccccatgaagcatgggcacgcataccataacgttcggtaatgaataaaatggcattaccatctagtacccagcggggggagccactggtatagccgctattggtcagattgataatttttcctccttgtgcattcaccatacctatatcggaatatggatcatgccggtttccgataaattccaatgtgaaccatttgccatccggtgaccatgaatagtcaaagccaccgccggtgctgaaccaggtggagccgtcagtgacctgacgtacctttttggtttccagattaagcaccatcaaccggttacggtcttctataaaggctagttccttcccgtccggcgagaattgcggataggtacgttctgtcttgtccgaaggcaggagtacttcttcttcaatggtagtcgcattggggaagttagcttcctccttacgtgcaatcttggccatgtaaagttcccagtttccgttgcgttcactggcgtacgctaaagtacggttgtccggtgagaaagtaagtcctgcttcacgggcaggggtatgtgtgatttgcttggtagtattataatcggcagaagtgacgaatacttcacctcgtacaatgaaagcaatttgtttgccgtccggtgatacggtagctgaggtcgctccattactgaaattcagatccgctattgtattttggtcatcacgggtgatatcgatcttgactttctgcggtttatctccttgtttttgagtgtatatttctccatcatacgtataacagagagtgccgttgctacccattgacaggaagcggaccggatgagtcttgaagttggtgaccgtttccaatgattgaggactacttattggaaaggaatatacgttgaatgtaccgccgtttcgttcgctcaggaaataaacggtttgtccgtcgggtgcaaatacagggttacggtcttcgcctgcatgggcggtcaggttggtatgcttgccgttttccgaattatataaccatacgtcacgggtgatggacgaggtgtggtgtttgcgccattcgtcttcaaaacctttgcggtcttggtagagaaatgtttttcctgatttgtcaaagcagaccatttctgcgggagtacccagcacctgttcggtacgtccgccggttacagggactttgtatagttctgtcatagctgaggtagggaacaaggcactgttggcagggtcttggatggaggccgagaacaggatatagttgccgtcggtggtgaaggttgacggtatttcggaagccgaatgggtggtaagacgccgggctgctccgccatcggccgacatgacaaacaggtcgaaattaccattgcggtcactggcgaaggcaatttgtttactatccggtgaccagatggggttacactcatatgaggcttgcgtagtgagttgggtggcagttcctccgttggagggtactttatagatatctcctttataacagaatgcaatttccgtgccgtcgggggaaatttgcacgtcacgcagccataaaggtgtagctgcataactgcttgctgcaacaaggcttaaagcaaggcaagttagaagttttttcatgtatttatttcttttagtttgtacgcaaagttaagcatttgcactttattgcaaaaaaaagtgcgaaaatatttggactatattgcaggaaaaacgtatctttgcaccgctttccaaggaaagcacataatgattggactatggtgtaatggtagcacaacaggttttggttctgtttgtccaagttcgaatcttggtagtccaacaattttcaatctaaaatgaaataaaaacccgttaaacatatagtttgacgggtttttttcgtatccggtcgtcacagttttaaaaatagccctataatcagggcccaattggatgccaacaatttgctctcattgctttgggtgacttgtctgagtaagaacaaagatacaaaaataaaagtctaagtgtttaagatattgtttttataaaaaagttagagccattctccttttatactacagatttatttttgaaatttctcctgtttctgttgtttgattcatatttgcttttctcttctatatttaaagaatgcggtatctgtctatattaaagtaaaaataagaatgaatagggtactgaatatcgggaatatgacaaataaaaatagttacaatatctacatatctcttggcaagagatctataaagtatattgcaaaaatacgtaaattactggtaataagcaataaaaaacaacgataattctatattaaagaaataaaaagttatgataatcaaagtttatatatgtatttggtgaaggatatttattttataactatctgtatttcagtgtattaatcatgaagagtatatctcttgccaagagatatatcgtaacgtagcatgaattgatataaattatagatataatgaagttaaaaaattatgcaatcttgctttctttcctgcttggtggaagtgcatttgtgaaggcgcaggatatcgcgttgaagagcaatatcctttatgacgcctcaggcactatcaatttgggtgctgaggttggtcttgcccccagatggacgcttgatgtatcaggcaactataatgggtgggtccgttcgcatggtcgtacgtggaaacattggatgttgcaacctgaggcacgttattggttctgtgatcgttttaccggtcattttgtgggcgttcatgctcacggtggacaatacaatgtgggtaacctgaagaatgacatttcgtttttgggtagtgatttgtccaaactttctgatcgtcgttatcaaggatggtttgtaggtgccggtattgcttacggttattcgtggattctttcccgctactggaacgtggaggccgaaatcggtgtgggttatgcctatacccgtttcgatgcctatccctgtgccgattgcggcaccaaactgattgatggcaaatcccatcactatgtaggccctacaaaggtcgcactaaacctgatctacgtattttaaaagatactgcttatgaagaaattactatgtatacttcttttgttattttgcataataggaataaacagccagactattctgacgttgggacgtgtaaaagtagacggtctgaatattgctcgtagcggtgagaatctgcttgtgtcaatgaatattgatgtggcaggtattgatatgccgtcttcccgtgaagtatcttttgctcctgtgctccgtgcggagaataatgaattgtttctttctcctgtagtgctggcaggtcgtaaccgttattatttccatttacgcaatgatgctgctccaggtgtgggtatttcactgtttcgtgccggtcatgaccgggtaattcattatagcgccatggtgccatatgctgaatggatggccgacgctactcttgagcttggcgatgaggtgtgtggttgtttgtgcgaggtacttttgtccgaccgttcgccgttgactacgctggattttcacccgaagattttctctccgatctttgtttattgtgttccgaaagcagaggagctgaaaacccgtgaactgaaaggttccgcttatattgattttccagtgaaccgcacggaaatttacgaggattaccgtcgtaatccgatagaacttgctaagatccgtgccacgatagacaccgtgcgcaatgatgctgatacccgcatcacttctattcacattaagggctatgcttctcctgagggtagttatgccaataacacccgccttgcccaaggacgtacggaaacattgaaggattatgtacagcgtttgtataatttcccgtctggtgtcatggctacagactacgagcctgaggactgggcaggactggagcgttatttgaaaacttgtacacttccggatcgttatggcattttggagttggtgcacagcggtggtgatccggatgcacgtgaacagaaaatcaaggcgcgttatccccgggactatcagtttctgcttcgtgaggtctatcccggtcttcgtcactcggactatacggtggaatatgtagtccgtgcttatactgatatagaagaggcgcgtcgcatttggcgtactgccccgggtaagttgagtttgaatgaattttatcgtgtggcggagagctatccggcaggcagtgacgagtataatgaggtgttcgaaaccatggttcgtctctatcctgatgatgctacggcaaatctgaacgcttccaatgtggcgatgtctcgcggtgatcttgtttcggcgcgtaagtatgtggcaaaggcaggcggcacgcctgaggcggtatatgcgcgcggtgtacttgccggactggacaaagactatgtacaggcacgccgcttgttgtcgcaggcacaaagcatgggtgtgaaagaggctgccgatgcactggaacagattaacaaaattgataagaagtaataatacctgaattcaaacagacaatgcaacagtgtcgaattcattgttagttaataatttatatttttcctttggggtcatgtaacccaatctttttctcggtcttgagtttaagatgttttgaacgcgcattacctgttcattggttatgtccctaaagtccgtacccttcgggaagtattgcctaatcaaaccattgctgttttcattggctcctctttcccacgagtggtatggttttgcaaagtaaacaaaaatatttagtttacgtgcaatttcttcgtgaaaactaaattcttttccattatctgccgttattgtatgtatttggtctctaaaaggttccaaggcatcgatggcagctttagttagcgggctggcatctttcccgctaagtagtcttatccatactagtccagttaccctgtcgtttatagttaatagtgctcctttgtgattcattccaatgactgtgtcaatttccaaatcaccaaaacgtactttcttgtctactatcgtaggacgcttgtctatgtccacgcggtttttgataaaaccacgtccattagtcaatgcacctctcttcttatgacttcttccccgtcttcttaaatgcttgtataacaacttatctccatgctttttatcttcccaaatatactggtagattgtctcatgagaaactgtttccaagccctttgttcgcataaacccagtcacttgttctggactgaaatctttctttatgagtatatctacttgaattttcaagtcgtccgtaaacttcacgaagtgctttcgtgaacgcattctggacatatacttagcctgagcgagatccggtttgtaaatgccattacgtttatcactattacgacgtaattcacgacttatagtgctacgatgaactcctacaagattggcaatctcggttcttgactttccgctttgcagataagcggaaatgttatacctttgttcttcggttagctgtttcatattgcaactgaatgttggggaactggaagatgcaaagaaacaacttttccacaggggaacaaaagggaaagaaatcttctttctctgttcctctgaaaaattattcttttcgtatcttctcattgtcatcattctcactcctgttgcattatccgcttgaacttaggataagaaaataaggaatcaatatgaaaaagtttagtaagattttgatgtccgggcttgcagcattgtgtttgtgggcatgctcagatgaggcaaatgtgtctcagccggccaatgctgagaatgatgtatatgtggaattcggggtgcaactgatgcagggaagcagttcaaggagcacgacaacagatggtgaggatggaaacggaagcaattctactggcggtgctgaagtgggcaagaattatgagaatagtgtcaaggagatattgttggtgctgacaaaggctgacggatctctcattgtcagtcaacgtctggatgtggaacctaaagaggatggaaaataccccagacttgtgacaactttggacagaagtgcattggagacatacaaaacaggagagatttacgcttatgctttctgtaatcccatttcttctatcaatatcaatgatctgacccatagtattcatacgctgtcggatgaacctgaattattaacagacaacgatgaaatctggaaaaaagacgctttcctgatgtctaaccacaatttggtgaaagtggcaaattctaccccgaatacgatttggaactgggaacaatatactgagtccaatcgtctttctctgggtaccatctcggtggaacgtgcttgcgcacgttttgatttcaaagcgagcagctatcccactacagaggctaccaacacttatgtgctggagagcaccaatggcgtcaaagtcctgctgactgatatggtaatggtcaatatcagcaagagtttctatcatctgcgccgggtgtctgctaacggacttgcggatgatatagacttgtgtggacaggaaacttcaaacaactatgtggtggacacggatgcaagggaaaagaacggtaatgtcggagaaacttataaaggtaactatttttataataacttttttgctaggtcggtagctgaatgggaaaataaattcacaaagatatcttctttgaccgaagaagacaatgacgaatcttggaacacaggcaatcgcaacggatacaaaatttggcgttatgcaaccgagaataccatccctgctcctaacagtaatcagaaaaacggtatctctaccggtgtgattttcaagggaaaactacaatttaacaagtcaacttatggcgtaaccggtgatcagcccatttttgtatataacaatgtgttgtatggtacttgggagaaagtgaaagatgtggctaatgctgccaacgcagatgagagcctgagagccgcttatgcccaaataggggaaacacccgctgccgatgctgaatttggcaaagcaggattcactgttttacgcccgaacggaagcggtgactatgaaatgtattattgctattggaaccgtcataatgacaataatgatcctaacctgatgggaccgatggagttcgctgtggtgcgcaacaatgtgtacaaactgatggtgaacaaaattaacggctatggtcatcctacctcgccgggtcctaaagatgatcccgatccgttcgatccgaacaatccggatgaacgaaatgacctctacatcgaagtaaccgtagaagtgcgtccttgggtggtccgcataaatgacatagagttctaaataagtacttattataccctattaaacaatgaataagacaacaagattcatacatacattaagattgccgggcatggtgctttgcaccgtgctggcggtagctgcattgttgtcctcctgccatggcatatacaatgatctggaaccctgctcgcaaggtgtccgtttgcgttttgtctatgactataatatggagtatgccaatgcattccattcgcaggtggactgtctggctctgttggtctatgacgaacagggcaactacctggttacttatatcggtacaggtgacgaactgaaagatgagaattaccgcatgaccctcgatttggagaaaggtagttatcatttcattgcatacggcgggctgacttgtccgaaaacctctttttcgttcaaggcggttcccggcatcggttcaatcatgcaggatttgcgtgtagagatgcataatgccggacgtgtttcggaaaccgatctgcatcccttgttccacggctcgctggacatgagtgtggacaatggcgcttacgaggaagcgactgtgtacctgatgaagaacaccaacaacatccgtgtggtgcttcagcagatgaacggcggcgaggtggacgacaagaactttactttccgtattacggatgacaacaccttgtttgctcccgataacagtctgataagcaatggcggacaagtctatgctccatggacacaagggcaacgtacagtgggagtgacagaagaaggtgatgaaacagtgacagtggcatacgccgagttttctacctcgcgactggttgccggcaatcatacgcgcctgaccatcacccgtaatagtgacaatgcgcaggtactgaacattccgctgaacgagtatctgctgctactgaagagtgatcacttcgacaaaatgggtgatcaggaattcctggaccgtgaaaataactggtcattgatatttttcttggataataatcacaattggatacgtacccatattgttgtcaatgactggatagtaagaattaatgatgcagaattatgagaataaaggattggggatataccgtggccgtgctgggcgtctgcttcctcctgatgtgcggatgtgacagcagaagtgatgaggggctttcgttatctaacgggcctgatgcggtctatctggatatcaatgtcgccctgagagatgcttccgcatccggacgttctgtttccggacgtgcggaggaagaaatgtatggtgaggtgacggaagccgagaagatgcatacgctgcgtgtcattctggttcgtccggatggcagggtggaacataatgtctatcttgatttgaagaatgcttctgtgagcgaccggtatggaaaaatccgcctgaaggtgcagggcaatgaggaaaagactatttacctgctgggtaacgaggggagtgcttcggtggaacttcccgctgtggagggtgaggtgtctcgggtatccaaagcttggggcgactttaaacccggagacaaatttcttgccaaggagcagatggcagggcttgtgttgtcgtttgacaatgtgggggctttcgataaaactcacccgctacctatgagcgaatgtcatacggtgatgctggatgacgaaggtctggaacctgacaatggggagcagggacagaccggtgaagagggtgagaaagtggtactgaaaaagaaggagatcacattgaaacttacccgtgctgccgtaaaattcacgtatgagataacgaacaagagtagccgggattactggttgagtgtaatcagaatagataagtcggcttcccatgaatatcttctgcctaatggtatgacgtacgatgatgcggaaaatgtgactgatttccaagtaccggcagctaaatatacaccgtttaatcagctatacaaggagaataagaaattgacagcaaaatcaacggagccggtcaaactaccttcattctacctgtcggaaggaaagtatgagaatgccaatgacacatattcagataatacgaatggcaataattataagacttcctacaagaccgctattacgctggatacaaaggataatagtggtgaggtgttaggcgacagggccggaaacacttccttcggggagttcaccttggaaagtttctttccgaatctttctgctttgcctcgcaatacccatgtggtggtgcgcatcaccatcaatgatgcgaatgacatatcatggcaggtggatttgcgtccatacggcgaagtggtacttgaacctgaatttggaatataatgaaaataaggagaagagaatgatgaaaaataaagcgatgcgttgtgtttggttggtatgcggtatgttgatgcttgccgttacctcgtgcaaggacgatctgctgtacacggacggggaacctattcccgaaggagaaaccacaataatagcacaggtggacttccggccactggtggaggggcttgcgggcaaatcgcgtacggcgggtgatgctatcaagtccattcaggatttgtgtgtgttgttgtatgacacggaaggaaattttgtagagggacattcgttggaatcgataagcaatgcaaacccgactgatggacagttttatgtgaatgaggtaacacgcaaggatggggatgcacctgatggtggcactatagccgaaacgaaaaccccacaagcgaatctcaaattgaccattccttacggacgttattacatctatgcggtagccaatatgggagaggactttaagaaggcggttcaggcgcatgggaaggaaaatggtgctgcagaggaggttgcaaagtataagacagctattgcaacgaaagaaggattaaaaagcatttctcttacttgggatgttgctgatgtggctaagaacagtcagatgttcggtcatttcaccatagtggggcaagagaataacagtgaattgatcactatcaataaaaagggcatgaagttgcattcctggatacgccgtgcagcttccaaggtaacgattgcatacgatggcagtaaactggaagagggtgttttcatttatttgaaatcggtgaccataaaggacatcccgcagaattgttgtctgggacaggataatcctgcagttccggaaaactatcaaccgaaggatagggacgaaggagtaaagcttgatttgataaaaaatggtgaaaccataaaatattatgaaggtgacaccgagccgactataagtgattttaaggaaacatacgaagcccgtattacgaaggggaaacctctattcggcagtaaagaacagggtgaaaacgcatatcatcccaaaaagttggcggatgtgcataccgaaattaccaacgctctttatttttatgagaatatgcagggtaagggtaaagaaggtactcctagtgataaacgtcaggtggttgcaaatacccttaataagaccgaaccgacctatcctaacggaggtcaagagaacaatgaagcatggaaagatgccaagccatacggaacctatatagaagtggatgctttttatgtttctatcaatgataagaaagtgggtagaggtcctatcaagtaccgctttatgttaggaaaagatgtgataaccgattataatgcggagcgtaaccatcactacaaactgactttgaagttcaagggatatgccaatgatgcagactggcatatagagtatgaagaaccggagccgggtatcgaggttccgaatccttattatatctcttatctttataaccgtacgatgaatcttccggtaaagattaatacgggaggaggtacacttacgtctttaaaagctgagattctcacgaataattgggcaccgtatggaacacttcctttggcgaaaggtgggttggattatgccagacaatatgattatgctgaaaatccaagtaactcatcgctaaatcaaccatggaatggatttctttcacttcgtaaaactgctgccagagttctagcttgtaatcaagaagggaatgctaaggatcaggtaccctccggtctaccagaaggagcaatggtaaatatcagtagcaataaggactattatgagacaacaaataaaggagttcgtaaatatgtagtgggaaatggaacacatgaggaagcagacggtaattacagtataactgaaaatgacgatcatttacttgcttctattcctttatatactcgcgccaaacagatgcatattaaaacgggttatacaggaaataatccgtatgtggcttatcagcggcatgcaaaagttaaaattaccgctacggtaaaagtgtcagacatagaacatacacttgaagaaactgtcgatatatatcaagtacgaagacttgtgaatcccaaaggcatttatagaagcaataacaaaaatgagccttttcatgtaactttattgcgattgccaagggaaaatgcaacagagtttattcctttttcatccgaaggaccttggaaagcgtatgttgtaaatgcacaaacagaggctgatagaggagatcccccttatacagatcctaatcgtggatttatcagtctttctgtttcagatacagaaaatacaagtcaggatgaaaagggggttatacatggtgttactggttcggatattaaatttgatattaattttaatggaacaatagcagcggatgcccccaataggaatgcgatagtgcgtgtggaatatcataattatacctgcgaacatcttattttcgtgcaccaaggaaaccggccgcagaagttgttatccgacaagccggcatggcatgtgtcgaatctggtcagcaagaatagggaagcttctaatccgttggatgaaggctctttgtttaaatataaaaatcttgatcagcctattgctgcaaagaatcagtattccagtaagattccaatgatagatgtaacctccaaggatttccctgatcctgtatcaaatcagaataggtatgaattggtaggtggtgaaatcaagaagtggatggagataacaaatcagcctgcaaataataaagaggcttcttgggggcttgacttgacgagtactcgtattgctcaaatagaggattatgaggcattgtttgaaaacgaaatgattgcgcaaggttatggtgtgctttatggggatgaatctacggaacccaaaacaaacattgtggatgcatacggatatcaagaagatcaagcatattacttcggtggaagtgctataaaagaccgtggaatacgtggatgctttgtttataatagaaatacgggtaatcatatctttcttccggtgggggcttccggatatggtcatagaaaagctaaagaaggaaatggagttctgcgttattcttgcgggcaaactcagatattcccaacgaatcctaatggattctatactgatgcatctaccgctccgttattttatgacctctatatgcggcccggtgctatttattggacagaggatgttactggaacaggaacatggggaacgactgtaggttgggatattaattattttacatttgactttaacagaatatatgaggctaatgtgtttaatggaaataacagtgacgcctgcttcatccgttgcgtagaagatccaaattagtttctttttaggcaaatataaacaggacaatcgcatccaaagttgctggaacttggattcgattgtcctgtatgttgttcatgtacgtgcgtgaatgtttgcaaatatttctggtgacgctcttctcttaaagtttcattttctgctgccactgctaccaccctatgtgtagggtgttcttgaaaactaccgggattaacgatgcagcacatttacaatttccaccacatacatcttgtgaaaaccaccgtgcgattccccgtaccatcggtctgtaatgctcttgtcgataaagtttctgggcttgatcaggtcggcatacaatttcttgcattcaaaagtcagccgcgcctgctcaaaaataatgctcccgttctcggtgaacaagggagatagtcctgtcgcttttactttatccatgtcacgtcccgatttggaaccgcatattttatgcacttctttatgctcttcacctagaaaagagagagtgagatagtcattctgctctataaagtcgaatgtataacgctcggggcggataaagataaaggctaccggacggttccatagaaatcctgcacctccccagtttgccgtcatggtgttgaatttgtctttggtaccggcggttaccaacatccattccttgctgattgtctcaaacagattgtcagtcagttcgtttacttttatttctttcattgtttccgtatttttagctagtacaaagatataatttttttcttttactgtttcagattaaatttgctaattattatctttgcgagaaatattaattaaaaaaagaaaggacgatacagtggcaaatgatgtagttttaaccccgatgatgaagcagttttttgagttgaaggcaaagcatcccgatgcgattatgctattcaggtgcggggatttttatgaaacttattcagaagacgctattgttgcctcagagattttgggtattacgctgaccaagcgggccaatggacaggcaaagagcgtagaaatggccggctttcctttccatgcattggacacgtatttgcccaagctggtacgtgccggcaagcgggtggccatttgtgaccaattggaagatcccaagatgactaagaaattggtgaagcgcggtatcaccgaattggtgaccccgggtgtagccatcaatgacaatgttctttcttacaaagaaaataattttctggctgccgttcattttgggaaagctagttgtggtgtggccttccttgatatctctaccggtgaattccttaccgcagaggggccttttgactatatagacaagttattaaataatttcgcccccaaagaggtgcttttcgaacgtggtaaacgggggatgtttgaaggaaatttcggaagcaagttttttacttttgagttggatgactgggtgtttaatgaaagttcctcgcgcgagaagctgttgaagcactttgagaccaagaacttaaaaggtttcggggtggagcatcttaagaatggtattgtagcttcgggcgctattttgcaatacctcaatatgacgcagcattatcagatcggtcatattacttctctttcccgtatagaggaagaccgttatgtgcgtctggataagttcacggtacggagcttggaactcataggtagcatgaatgagggcggaaccagtctgctggatgtgatcgaccgcactatcagtcctatgggagcccgtctgctaaaacgctgggtagtctttccgttgaaagatgagaagcctgtcaatgaacgtctggatgtagtggaatacttcttccgcgagccggatttcaaagagttcatagaagagaaactacatctgataggagatttggaacgtattgtttcgaaagctgccgtaggacgaatctctccacgcgaggtggtgcaacttaaagtagctttgcaagccatcgagccgattaagaatgcctgtttgaatgcggataacgggagtctccgccgtattggggaacaactgaatttatgtctgtctatccgtgaaaagatagcgaaagaggttaagaatgatcctcctttgctggtgaataaaggtggtgtgatagcagacggggtgaatgcagaactggatgaactacggcagatagctttttccggcaaggattatctgcttaaagtacagcaacgtgaaagtgagctgaccggcattcccagcttgaaaattgcttataacaatgtgtttggttactatattgaggtgcgtaacacgcataaggacaaggtacctgccgactggatccgtaaacagacactggtgaatgcggaacgctatattactcaggaactgaaagaatacgaagaaaagatcttgggtgccgaagataagattttagtacttgaaacaaagctctataacgaattggtgatcgctttggcagagtttattcccgccattcagattaatgccaatcagattgcccgtttggactgcctgctggcttttgcgaatgtggcgagagagaacaattatatccgtcctgttgtggaggacagtgaggtgattgacatcaggcaaggccgtcatcctgtcatcgagaagcagcttccggtaggggagaagtatattgccaatgatgtctttctggactcggaaacccagcaaatcattatcattaccggtcccaatatggcgggtaagtcggctttgctacgccagactgcgctgattaccttgttggcgcagatgggtagttttgttcctgccgaaagtgcgcggatcggtatggtggataaaatattcacccgtgtgggagccagcgataatatttctgtgggcgaatctacctttatggttgaaatgaatgaggcggcaaatattttgaacaacctttctagccgcagtttggtgctgtttgatgagttggggcgcggaacctccacttatgatggtatttccattgcttgggctattgtggagcatattcacgagcatcctaaagccaaggcacgtacactgtttgccactcattatcatgagttgaacgagatggagaaatctttcaagcgcatcaagaattataatgtatctgtgaaggagatagataataaagtgatttttctgcgcaaactggaacgtggcggcagcgaacattctttcggtattcatgtggcaaagatggcaggtatgccgaaaagtattgtgaagcgtgccaatgatattctgcatcaactggaaacggacaaccgccagcagggcattgccaagcctacggctgagatagcgtccggtcggagcggaatgcagctcagcttcttccagttggatgatccggtattgggtcagatacgggatgagattctgaatttggatgtcaataatctgacccctcttgaagcattgaataagctgaatgatatcaagaagatagtaaaaggcaaataaatgccttcatttttcattaaccattaattactaaccattaatcattatcatgaaacacctactaaccttatggatgttggccttgtgtctatgtgtttcggccaaggaaacatgtccgaaagtaattcccgccctgcaagagtggaaggggggaagtggaaaactcgtattgcctgctgaaggcagtattgttgtagctcctgccgatgaggcggcactgaaaagtgtggcgactgtgctggcacaggacttgaaagacctgttggattggaactacaccattaggaccgggaaaccgggaaagaatgatatttatctttcattgatgaaacccgacaaacaattgggagaggaagggtatgtgctgactgctggacgctatgccggtatcgaagcgccggctcgtcagggagccttttggggaacccggagtttgttgcagattctttataatgaaaaaggacagttgcccaaaggagttgcccgtgactggccgcaatatcccagtcgtggcttcatgctggatgtgggccgcaagttcttcacaatggatttcctgcggcaatatgtcaaaatactatcgttctataaactgaatgaatttcagatccatctcaatgacaatggttttgtacagttctttgataacgactggaacaagacctacgctgctttccgcctggagagtgaacgttttccggggctgaccgccaaggatggttcttataccaagaaagaattcaccgacctgcaacgtctgggcatggaatatggtgtgaatgtgattccggagattgatattccggctcattcattggcctttacacattataaacccgagataggcagtgataaatatggaatggatcatttggatttatacaaggaggaaacctatcgttttgtagattctttgctggatgagtatctttctggcgagaaaccggttttcataggtcccgatgtacatatcggtacagacgagtacaatgccaaggaagctgaaaaattccgctattttacagaccggtatctgaagtatatagagaaatacgggaagaatgtccgtatgtggggagcactgcgctggttgaaaggaaacactccggtgaaagcagataatgtgactatcaatgcctggtcatacgactggattgatcctaatgcttctttgaaagacggatataagattatcaatacgtgtgatgcttatctttatattgttccggctgccggatattatcgtgatttcctggacacgaaatggctgtatgagcaatggcgtgtgggtaaagtgaatcctaaggaagagttgcctgaaggaactccgggactgttgggaggtatgtttgccgtatggaatgaccattgtggcaacggtgtgtcacaacaggatgtgcatttccgtacattcccagccgcccaggtactggccgagaaaatgtggagaggtaagaatgaaatggtttcttacgaagaatttgagaaattgtgcaaacagatgcctgaagctcccggtatcaacctgctggggcgtgtgcagggtgaggtagtctttccggggcagaatgaagaactgtctttgaacggtacggacagcattgccactatgttgccggaaataggctatccatacgcggtagaatttgaaataaatccggacaaagaacaaaatatcaacggtattttgtttaaaggccctcattccaccgtatatgccaattgggaaaataagggaaagctggctttcagccgtgacggctatacgtttgtattccacgctgctacactgcctgccggagcatggacgaaggtacgcatagagggagaccacaaaggtactactctttacataaacggtgagaaagcggaacgtttggaaggacgtgtcaaacagttttacaactatactcataaacgtaaggacaagatgtatatgcaggaaactttggtgtttcccatgcggcagataggggatgtgcagaatgggttcagagggaagttgcggaatataaattgcatgcaataaaagatatttctttctcttgctgtgtaggggcaggttttagacctgtccctatgcccaataggagtgaaatttctccgaatgttatctttaatagtgttatattgtttattatcaatgttttatatgcgataaatgttatctgttttattttcatgaaaagggctttataccttactttgcattattaaacttaagcaacaaacccgatgaaaataaaacaaattctactttgcatgcttttagcctgctttattcttcccgcttccgcacagaatagctggggtattgtaggaggcggacttttttctaaatctttgtccagggatgcacgcttcagcctaggcggttatgccggaggaatgtatgacgttcatgttaaaaactcatggtatgtacagccacaattattatttacttatgaagaattcagatccaagacaaggcttggtaccgattccttttttagtaaattcaatttggagcttcctatccttgcttcttataatgttgctttaaataacaaatggaatttgcgcatcaatgcgggaccgtatctgtcctatgctatgtttggcagggataaatccattgactacgcctatggcaacggaatgcactctagtttgggctggtggcatcaggattttccagatcattttacttacggtggaaggaccggggtttcattggaatccgagcatttcatttacactatcgatggtaaatgttctcttcgtaagaggcctttcgggcggaatgtcagtttatcggccggtgtaggatataagttctgagttttctgtatctttgtcgccggagaataaaaatagagttgcatgtatgtttatataaaacagccgggtattgtttgccttctatgttggttttgtctttcctgtactttgcagcgcacggaacatcctactttgcggcaagcaggatacttgatggaagaacatgccgacagtgcgttttcattattgaaatccatctcttccctgatcggtatgaccccggaagacaaggccgattacgctttgctgctggctgaggctgcggataaaaatggttattcactgcttccttgtgactcattattgaatttagccctccatgtataccatgaagaagccaaagaacatgctatagctcttctgtataagggtaaagtgcaacaggaaatggaaaactatgccgatgccctgaaaagttaccgtatggcgcttgaaatcctttccgcctatccatgtgaattctattggaaggggtttgtatataatatgttgggtgggctgtatggcaaacagaacttgtacgcacaggccaaagatatgtatgtcaaggcttgttataatgattcgctggcacggcataaccgtcatttcatcagttcactcagcaatctgggggtagcttatatcggctatggaaatatagactccgcttttatctgccagcaacgcgctttgcagctttctctttctactgatagtttccttttgcattctctttatggaaatataggggatttatgcggacgtacaggacggaccagtatagctattacttgtctgaaaagggcatacgatgcttgtcgtcttagagaagacagcttgcagtgtctttggaatctaggggaattttattataataacgggcagcttgattcggctctttattatttgaaccggagcaaggaagctgtcgatattcatatccggtatctctctttctttgacttgtatgccatagctaagcagcagggaaatgtggagaaagctttggaatatctggaaatcagcaccgagttggaagattccatctattccaccaatgtggccacggaactggagaagaagacctatcgctggaatgccgacgcgcaagtaaggaaagaacagttcaaggctaaacggaggatatacaccattgcgatgatagctgtggtgttgctgctggtcattgtgattatttatcaacagatactgaagaacaagaagatacagcaatccaactataaatatctgttgcagaagctgaaacagaacctgatggatatgcagcagaatattgctcaacatgaagaggtgatagccgaattgaaacagaaacaagaaagccgtgccgaggaaatagaagagaaggaacgggctatagaggccatgaagatggagaaagagaaattgcgcaactggttgttccggcaaagtgccctctatacgaaaatagacaaactggccaaccagcaaaagcatcacaaagagcgtattgcagtgctcaccaatgctgagcaacgccaactcagagtgattataggacagatttatgctgattacatagagcaactgcatacccggtatcccaagttgaacgaagatgatgtccttttgctatgtctgcaattggcggatttatctccttttgccatcgctttatgctttggtaataatgatgcacagattgtagcgcaacgcaaatatcgtatgaaaagtaagatggaataactgtgtgttacagaatttgcataatgtttttttaatagatgtttgtatatcaggttataaaggcattttgctatctttgtgcatagaaagctaaaagacaaaattactatgcgttcatttattatatatttaaatttcgtcagtttgctggctgtctgtttgtttgcctgtaaccaccattcttccaatccgatgttacagcaagtagattcattgttggaaatgaagccggacagtgcattgactattttaaaaaatatatctgttttagaggatttgccggaagtagacaaggcatactatgctttgttgctggctgaggctacggacaagaacaaactacccttattaccttgcgattccttattgaatttcgccttggattattatggagatgatgatagggagaaggctgtggcattgatgtataagggaaggctgctggcgcagatgaatgatgaaatgtcggcgatagagcataatttgaaagcgttggaagtgttgcagaattatccgcaagatttaaaatgtagaagattgatttatagtatgttaggggtatgttatggtgattgtgaattgtacgacaaggcgttggaaatacaaaatcaagctcttctttattcttttagtgctaaagatactgctattgcctatcataacattggatatatttatggtatgagggatatgcaggattctgctataacttatcagagaaagtctgtggaatatgctatgcgttctaaagatacaagcatgatactcacttcttggcacaatttaagtctgtattatggacgatttgaaaacatcgattctgccgtggtttatgcctataaagttttgcaaaatatatctgatgaaaataaaatatttagcggttatttctataatataggtgatttgtacattggtttaggacaatatgattctgctaggtattatttagagaaaagcctgctcttttctccatccctttctatgtcttactggtcacttgccgtaatggaagctaagctaggaaatttcaagtccgcctatcactatctagatacttttgtcatggttcaggattcattggatgctagtgagcgattgtctgaagtgcagcatatagtctataaaaatcagacagcattggaagtaaaggatgagcaaataaaatctagaaaggttatagggcgtattgttttttcagccattattatttgctttgtcgttgctttgatttaccaacgttggataaataagaaaaataaccagcaggcactctatcggcaagcattacaatatgctgatgagaaacagaatgtgatgcagcagcgcatagaagaaaatgaatccgctcttgcactgttacaggatagggaaaaccaaaatcttgatgaaattgcccaaaaagagcaattgataactcaattgaagaaagaaaagttggcacttcgtacatggttatttcagcagacttctatatacaaaaaggtgatgtcattgtctgaccagcagcaggtgaataagaaaatccgtaaggtgatggcagctgctgaattggacaaactgaagaaaacgacctttgaaatctatgctgattatatttctcctttgcaagcacaatactcccaactgacggaggatgacttgttggtcctttgcctgcaagaagcgggtatttctccgttggccatttctttatgtttcggacatacggatacggtagccctcaatcaaaggaaatcgcgtctaaaaaagaaaatgtcagagtgataaactgaaatatattgtttatcagtgttttatagaaatattatgtcacagcaaatagttgtacgttctttcctttccctctaactttgcggcatcatttttaaacaaaaagaagtatgaaagcaaagttattattgatgttatttttagtttcgttaagtttgggagtttttgctttggagcatcaccaaaagaagcctcatgcagtttgcaaagtttatgaaaaggtggctactagaattccttttattttttcaatacaagccgaagatataaatgactgtttgtatctcacatctcagttctcattaaatgatgctgatattactatgctagataaggatggtaatgaaaaggtgtagttatgaataacgcatttgaaaaaacagctgtacttcctaagtgtaataaaggaagtgcttactcgactcagataaatttaagtttttaagtaattccaattaaggctgtatgataatattttagttgataatctaaggttattgataatgtgaagttcatatctgaatcttattttattgctcatgttatgataaaatatgttatatggttgatttttagtgttgtataggtgagtgatgttatatggatagagctttatgcttatatcttctttctaattttgcaacatcaaataaaaaaataagtatgaagactaaaatgattgtagtggtggtgttggctgccatgtgtgtattgcctttgtctgcacaggtaaaagttggtgtggaaggtggaatgaacctgtctcattatctggtttccggttctgacggatataaagccgaacaggtaggtggaatgaagcccggctttcaattgggggtgactgtggactacgagataggaaagcattggatgttaatgtccggtttgtcttggttgcagaatagaagtaccatgaaaatgatggatcacatggttacttattttcctaagacagagataaagatgaataatctgattttgccgttaaaaatgggatataatattcgggtttcggataaactcagcctcattccgtcggttggagtttatgcttcttacggatttggtgctggaaactgttctttggatgttattcaccaagagggggataatataactaccgagcctgcaaaatggaagcccttggatggtttttcctataaagccggggagcccaataatagtgctaatcttcaggctttccgccgttgggattatgggggcattgttggaatgaaggctgttattgccgatcattatacgataagttttgattatagggtcggaataaaaaagatacaggcacaaaatggtttgcggaattcaactttccagttctctgtgggctatcgtttctaaactgatttaattaaactggcaatctgtcaaaatgataatgccggtgtatgagggtgtcctgtttcaaaggatacagtttgtgtattttcatcgtattctcgtgcatcggcattttgacagattgtcttctttttctggttatttattcttttatggatatatgtgaacgtatatgtagggaaatgcatacatacgtgtccgacagggatctttatgccttttgagacccctctatttattgagccagctctttcaatatctcctctattttctgaaagagttgtcctatgtgcgctccgtccacaaaagcatggtttacagtgaaagcgatgggcattaccagtcttccttcgcgtggcactactttgccggcattcatcagcggatagtctaatggatggtcgggagccatttgtgtataggtgagtgaagtgaaataaagctgaggcgtggcactcagttggataatatcaaaatctccctgttctttaatgactttttcggctccatacgggtcaccctcttcggggatgttatggacgatgtgatatgcttcggcataaaaccgttcaaaatctgcatggtaagggatgcggactgtgtagaaagtcttgccgggtacagcgataggtgatatgatgtccacctgatcgtgatagaccacctgtccgtttttatctgtacggaaacggaattctttcacttcattggcagcacgtagcacagcatacaggtaatacaggaaaaaagagcgcttggcggcttttgcagctggaaatgcttcagtgcaatccacttcactggtaatggatatccatgaattatggaagttgcggaaaaaattataattgtcccggcgttcccaagtttcaatatctattatatgtttcatttattttacgggtttaaaagaatggtacatgaagtgcgctcccagcagtatgaacggaatgctgagccattgccccatgttcagcatcatactgtcttcaaaggcttcctggctggcttttataaactccacaaggaagcggaaggtgaatatggtagtgaggcagtagccgaaatagaaaccggggtatagcgtggttttgtactttttatacaaccgcaagcctatgataaaaatcagaagataggcgatggcttcgtagagttgtgccgggtggcggggttgcatatcttcgtgcggaaaaatgaacgcccaaggaacatgagttaccgtacctactatttcaccattcatcaggttacctaaacggataaaacaacctgccagcggggtggcgatggctatattgtctagtacagtcaggaacttcaattttacacggcgtgaatagatccataaggcgagcattagtccgatggttcctccatggctggcaagaccttgataaccggtccattttatcccagaatcggtaatcttgacgggcaacagcatttctacagggtgagagagccaatagcctggttcatagaacagacaatgtcccaggcgagcaccgataacaatacccagcaggcagtaaacgaacagggaatcaaatttttcgtaaggaattttttggtcttggtagagtttgtatatcacccagtaggccaatgaaagccctgtaacgaacaatacggagtaataacggatggaaatgccgaaaatggaaaagatttctatatcgggattccaaagaatggctgacagtgtattcatatcttgaatttttgtgcaactttgcggtaagtgggcatatccacatccatcttttcgcccagtgcgatcatatcaaacaatagtccttgtatttcggactcatgtcctttggctatatctttttgcatggatgcggtactgtccgggtctaatttgtcaatcacttttaagttgtattctatcgggtcttccgcataggtaattcccattttgcggcctatttcagaactttccttggacagaccgatgaaagtgtcgcgttctgctccgggatgttgcagaggacccattgggacatcatggtaggcacctgtgcaggccatagccgagatgaatgaccatttgatgaaggtgtcgcgattgatatcatccgaaatatcggctttgatccctgcttttcttagtacatcgacaatggtttccagacgttccggagccacaccctgttggggacgtgcgccgaaaaccagtcggaatattttgcccatttgtgtgatttcacccggtccggagacgaaacctacgatgtagatgcatccgtctagtactgttacatgtgaaacaagttgcccgatacggggacctgtaccgtaaacattcaggatggggataatcaaggtatctttatccgaggctttttccaacagatctttgatggaatctagggagtagccctttacgcatacaaaaattacgttggctttctcgttgtattcctcggctgtgcaggcttgtacaggcagaaagtgattacctttcaagtctgatcttaggtgaagtcctttttcacgaatggcttccagatgcttgccacgggcaatgcatgttacatcttttcctgctaaagcaaggaaaccggcgatgcttcctccaacgccgccggttcccacgattaaatatttttccatgttagttgtattttgttttaggaaacaaaacactgacttatcagtctgccattagttttgctggttccctgatgttttttcattcatagcatggctgtgataagtcttttgcgttttgatttacctacggtttatacattgaagcggaagtgcatgatgtcaccgtcctgcactacgtattctttaccttccacgcccatttttccagcctctttcacggcggcttccgaaccatatttaatgtagtcctcgtacttgatcacctcggcgcggataaatcctttctcgaaatcggtgtggatgacccctgcgcattggggtgctttccatcctttgcggtaggtccaggcttttacctccatttctccggcggtgatgaaggtttccagttccagcaggtggtaagccgatttgatcagacgatttacacctgattcttccagaccgacttcctgaaggaacatttggcggtcttcataggtttcgagttctgcgatatcggcttcggttttggcggctacgactagaatttctgcattctcttcttttacggcttcgcgtacttgttctacatatttattgccggtagcagcgcttgcttcgtccacgttgcatacgtacatcactggtttgctggttagcaagaacagttcttttgcgattttctgttcgtctttgctgtcaaattgtacggtacgcgcagatttgccttgttccaatgcgtctttgtatttaacaaggatgtcgtacatttgtttagcttgtttgtcaccgcccgtctgtgcctgtttttgtactttttggatacggctttcaatggtttccaaatctttcagctggagttcggtgtcaatgatttctttgtcacggaccggatctacactaccgtctacatgagtcacattttcatcatcaaaacagcggagtacgtgcagaatagcatctgtttcacggatatttgccagaaacttgtttcccaacccttcacctttgctagctccttttacaagtcctgcaatgtcaacaatttctacagtagtgggaacgatacgtcccggatgaaccagttcggcaagtttggtcaggcgttcatcaggaacggtgatgacacctacattcggttcgatggtacagaaagggaagttggctgcttgagcctttgcattcgataaacaattaaaaagtgtcgactttcctacgtttggaagaccgacaatgccacattgtaaagccattatctatttgtttttttgattattatctatctatttgtttgcaaagataaccattctttttgtatcaggcttcatattgaagtcagatttggcttttttatatgcgaaaagactgcccgtcacgaaacaaaaagggcaaccgtcacggttgccctttcgtagagtttttatgaaaagtgttagattgttagaatagatttatttgtccatagttacggtcatttcgggtactaatatatattctttctttttagagttccatttgtaatattcagtagtcatacttttgttgccataagtataacgaatgcagaggtcattttcccagcgatttttgttactgttccatttttgcgcctcgtcctctgtgcgttggttgttggcatcatacttgtaattgtgcttcatataattagtaagcatggtgccttccattttaaaaatcgtttccgaaacaattactccatttacttcttctgcattgtaaatcaggttgtcacccggatttcctgcaaaaactgtaaggttagcaataaataaaattgctacaacgagcattcctttcaaagaattgatcttcttcatgatattgatatgttagattgttactttcatattgtttttaaaaacggtgcaaatgtacgaaagaaaattgaatctcctaacatttctgctaaaaaatgattatatttttgcaaaatgtcactgattaaacaaatgttaataattgtataagatctatttattacaattatcttgtgtttgtgtttttcatttacgttcgggatggcaaatgaaaagctcaatggattggaaaagaccattgagcttttatgatataaataccttatatatagtactatatatcttgcgaatagttggtttctatatgctttaatgcgcttcaagccagttgcttccccaaccgcagtctgcgcgtaaaggtacttgcatatggtaggcattttccatctcttcaatcacaattttctgtactttttccttttcttcgggtagaacgctgaaatttaactcatcatgtacctgaagtatcattttggactttatattttcagattgaaagcgctggtatatgcgtaccatagctgccttgataatatcggctgcacttccctggataggagcattgatggcatttcgttcggcatatccgcgcacaaccgaatttctggaattgatatccggaagatatcgtttacggccgaatatggtttcaatatatccttgcctgcgggcaaggtcgatgcttttgtccatatattcctttatttggggataagtttcgaaatagccgtctattagttcttttgcctctttgcggtctacattcatacgttctgccagtccgaatacgctgatgccgtagatgataccgaaattagctgtttttgctttactgcgttgttcgcgggtaactttgtctatacttatcttatatacttttgctgcggtggcggcatgaatgtcatctccttccttgaaagcctctatcatattggcgtctccgctaaggtgtgccataatgcgtaactcaatctgtgaatagtcggcggagaaaaattcgcaaccatcatcgggaatgaaggccttacggatttccttgccgtcttcgttgcggatggggatgttctgaaggttcgggttgctggaactgagccggccggtagcagtgaccgtttgattgaacgaagtatgaattttacctgtttctttattaatcaataggggcagagcatcaatataagtaccgagaagcttcttcagaccgcggtgttccaatatcttgcctactatttcgtgtttccctcgcaggctttccaatacttcttcactggtgacatattgtccggttttggttttcttggctttctccacgatacgcagcttgtcaaacagcacttcacctacctgtttgggtgaggctatgttgaaatccgtacctgccagttggtgcacttcttcttctatttggttcatgcgggcggtgaaatgttccgaggtctgttttaaggcttcagtgtctacacgcacgccgttgcgttctatataagcaagtacggggaccaggggcatttctatttcgtagaagagtttttccgcatcgttggttttcaattcctgttccaagatgtttttcaatttcagtgtgatatcagcatcctcgcacgcgtacttatagatagcttcgggggagagatcgcacatattcttctgacctttgcctttgggaccaatcagttcttcgatgtggatagtctgataatgcaggtaaatttcggcaaggtagtccatattgtggcgcaattccggttgtagtacataatgtgccaccatggtatcgaacaggggaccgcgcacttcagttccgtagttgcccaataccagcatatcgtattttatattttgtcctactttcaacgctccttctttttcgaaagccggccggaactcattaactattttttgcgcttcggtccgatcggcaggtacagggacataaaatgcttgattttcggcatagctgaagctcattcccacgagttctgcggtgatgggatcggttcctgttgtttccgtgtctagactgaaaatttcttttgtaagtaagttttgtaataattcagatcttttctcttctgtatcaatgagttgatagtcgtattttaaattatctaaacatgctagattcgaatatttctcactttccgtccctccgttggtaaattctgcaaagagattgccttgaggggaagacggagaagcgggcgatttgccattcgaagccggttcaccgaaaagggagagttgtcccgaaccgtccggcatgtttccctgccgggcgcttccttccggtgtgcggtttcgtccttgcagatcgtttccggtcgcatcggtgtatgttccggcgaaggcggatttcttgtttcggttgaaaacgcggtcgatgagggtacggaactccatctcttcaaaaatcttccgtagttcctcttcatttggttcttctcttttcagttcgtccatgttcaatgtgatggggacatcaattttgatagttgccagaaacttggagaactcaatcattttccggttggcttccactttggttttcaaggctcctttcagttcggcagagtgggagagaagattctcgatgctgccatattgcgcgattaacttttgtgctgttttctcgcccactcccggacaaccgggaatgttgtcggaactatcgcccatcagtcccagcatatcaatgacttgtgcgggtgactggatatcgaactttgcctttacctcttctatgcccatcacttcaaaaccgcctgtatgcttgggacggtacatgaagacatttccgcccaccagttgaccatagtctttgtctggtgtcatcatataagtagtgatccctcgtttgccggcttcggtggccagtgtaccgatcacgtcgtcagcctcgtatcccggtacttccagaataggaatacgataggcccggataatatcctttataatgggtacggacaaacggattacttcgggtgtttcttcacgttgtgccttatactgttcataggcctcgtgccggaaggtgggaccggcgggatcaaatgccacaccgatgtgcgtaggattttctttcttcaagacctcttccagtgtattgacaaatcccagtacggctgaagtgttgaaacccttggagttaatgcgcgggcttttgatgaaagcgtaatacgcgcggtatattaatgcataagcatctaatagaaaaagtttgtccattcttaaaaatctttagttttttcattgtaaaagtacaaaaaaataccgtattccgtcttttattactacttttgtgcacaaattaacctgcatggacaaattacagcaaatcaaattgcctattgacaaggagtttgaggaatttagaaggttgtttgactcttcgctccaaagttccaattctttacttagtgaggtgttatcctatattaagcagagaaatggcaagatgatgcgtcccatattggcgttgttgattgctaaactattcggtgaaatcaatgattctacgcttcatgcggccctttcattggagttgctccatacggccagcctggtgcacgatgatgtggtggatgagagtgacaagcgccgtgggcagtcttcggtaaatgctatctataataataaggtgtcggttctggtaggcgactatatgctggcaaccagcctgaagcattctgccatgacccgcgagattacaattgtagatttggtggcttgtttgggacagaacttatctgaaggcgagattattcaattggcgaatattaatgcttctgagttctcggaagaagtgtattatgatgtcattcgtaaaaagacggctgcattgtttactgccagtgcggaagcgggggctatttcggttcatgcatccgatgaaatggtgaaaaatgctcgtctgtttggcgaaatgattggtattgctttccagataaaggatgatatctttgactattattcttctgatgagataggtaaacctaccggaaacgatatgcgtgaagggaagctgacattgccggctttgtatgtgttaaatacgtttgatgatgaggagatgcggaaactggcgttatgtatccggtcattagacgcttcggatgaagatattgcccgtttcatcgaatatactaaggtgaagggagggatagagtatgccagacaggcaatggtggattatcgtaataaagcgttggctttacttccacaatcagccggtcaagctgtaaaagatgctttgactgcttatattgattatgtgattgaaagagataaatagtacgattgttgaagatatgtacctcaaaaagttcgggcgtgatcctttatacgataaggaccacgcccgagctttttgaggtacgcctttctttggtagtttaaaataaccggaatagataaggctcattccggtcactttaaatgtggttgttatttaaatagtgaaacggttctttgtttagaagaacttggtttcctgacctacaatttctgagagaagcagattggccaggcggcttgttcctaagcggaatagctcgtttgtcagccattcttcacctaacacttcttttacaatggtatagtaaaccaaagcatcgtgtacggtattaattcctccggcgggtttgaatcctactttgcggcctgttgtcatatagtattctttgatagcctcgcacatcaccaaggcggcttcaggagtagcggcggggttttcctttccggtagaggtcttgatgaaatcggctccggaatacatcgatagaatggacgcttttttgatgttggatgcgcttcccagtgctccagtttctagaattactttcaggtggtgctcaccacatacagcttttaattcttctatttcatcgcacattccttcgtaatccccactcaggaacttgcctaccgggataacgatatctatttcatcagctccggtatggagagccatggctgtttcggctacctttacttcagtaaatgtttgtgatgaagggaaaccacccgatacacaggctatgtttacatggtctgcctccaaggtgtcgttgactacttctgccatattaggatatacacagattgcggctacattgtccagatcagggtacttgtcaacaaattcatttacttttccggtgaatttcattacactttcatccgaatcagtgcactttaaagtggtcaggtcaatgcaatggaacaggaatttctttacgtccggtgtattgttttctgctacatgtttttcgatgagtagggcagttttcgcttttacatcctcatcgcgcaaacggatgttatacttggcaagtgcttcctcgtacttactgtgctcgggtccatgatcgtggtcatgacgatgttcatgtccaccttcgaattcgtgattatgttccataattctttataatttggggttgtttttatgtctgtctttatctctatttgttttcttctccaagttttgacggaaggcttcggtcaggtttactccggtctggttggccagacagataaggacccacaatacgtctgccatttcatcggcaaggttgtctttctctccttgtttgaaagattggtctccatatttacgtgccatcacacgtgccagttcgcctacttcctcggtcaggacggtcatattggtcagttcgctgaagtaacgtacaccatacgttttaatccagctgtccacctctttttgtgcttcttccagtgtcattattctttgtttttagtgtccatacatatagtaacaggcccgttgttcagaagttcaactttcatgtctgctccgaattctccggttcctacttctttgcctaaaccgatgcttagttcccggcagaaataatcgtagagaggaatggctatatcgtgttttgcggcacggatgtaggagggacggttccctttctttgtagatgcgtgcaatgtgaactggctgataaccagaatgttgccttctacctcccgaatggatttattcatcactccgttttcatcgtcaaagactctcaatcctattatctttttgcataaccagtcagcatcttcttgtgtatcagcttcttcgataccaaccaatatcatgaatccttcttttatcgccgatttgcatacaccttctatggtaacagaggcgtggcttactcgttgaataactactctcatatttatatcctttatttattattagaaaatgcttgccgtttaccggtattatgtccgcctactatggtgggtggaaacattgccgacctcttggcttgacagttatgagggcggcatatccttgcaatggatgtatgcaaaggtaggaaatcccttttattctgtgaggttttctttgatatttttagcggctgcttcacctaccacggctgcaatctcttccagtgaggcttgcttgatgcggctgacgcttttgaatgttttcagcagggcggtctttcttttctcacctattcccttgatgttgtctaaagcggatgccacctggctcttgctgcgcttgtcccgatggaaggtgatggcgaagcggtgtacttcgttctgtatattctccaacagatggaacaagggagtgctttgttttacaccgatggtcagcggaggaaaaccgtatagcaattccgaggtgcggtgcttgcggtctttggccagtccggctatggggatatccaaatggagttcgtcttctatcacttctctcactacttccatttgcccctttccaccgtcggtaatgatgaggtcgggcagggaggaaccttcctctatggcgcggctataccggcggcgtaccacctctttcatagaggcgtaatcgtcgggcccggtcactgtcttgatgatgtatttccggtaatccttcttgcttggttttgcctttttgaagactacacaggcggccactgcgtccgaaccctgaatgttggagttgtcgaaacattcaatgtggttcggcatcttcttcatatgtagctgctcttggatttctttcatcagacggacgcttctttgttctggatttaacttttccgcctgtttcaaacggtctactttatactgcttcacgttcattacggagaggtccagcaaatgcttcttttctcctcgttggggaacggtgaaggtgacgttgttcatttccatatccacttcaaaaggtacgatgatttcgcgggaagtgctcttatatcgttcacgcatctcaataatgcccaattgtagaagttcttctttcgtttcgttcagacgtttcttgtattcgaaggtgaaggcttggttgatgcatccgttagtgatatgcagatagttgatataggctgaattttcttccatttcaatggagaatacatccacattatggatgatggagttgaccacttcgctcttggagcgatagttttctatcaagtcgtatttctcttttattttctgtgcttcctcaaatttcatttcggcggcaagcgcttgcatttcctccatcagcaggtcacttacaatttgtgtatctcctttcaggatatctttgatttcaccgatattcttcatgtattcctcatgcgattgttgtccgatacatggccctttacaattttttatatggtattccaggcacacgttgaacttgccggcacgaatgttctctggactcaggttgagtttgcaagtgcggatgggatagagcttttttatcaagtccatcacggcaagcatggagggcatgtggctgtacggaccatagtaggaggagccgttacggatgattttccgggtcttgaagatgcgtggaaaatactcattgcttacacaaatggaagggtaggtcttatcatctttcagcaatacgttgtagcgcggtttgtatttctttatcagattattctctaacaaaagggcgtcttcctctgtctttaccacgatataacggatgtctgcaatcttgctgaccagcaggcgtgtcttgccgttggggtgctctctgttgaagtaagaagagactcttcgtttcaagttttttgcttttccaacgtagataatggttccttcggagtttaggtattggtaaatgcccgggctgtcgggcaggtttagtacgattcctttcagatagtcattggttgtaatctcttctttttccataagtgtatattggtattacctgattatatgttaacgtaagctcgatataaaaatacctcgttgctgaattttgagttaaatgacaaacgattgttttccggacaaatgagcgcttccgtaggggtggccccatgtgtccgcccctacggtggaaacatctcaaaatagcatttcgtggtatgattgtaggtaatcatcttataaatcttcaagctgtaagatatataatgttacagcttgaagatatatatctttcggcttcatcgtccatatcttttcgttgtccatccattgttgtctttctatagtgactcgggacggactttgcttttttacgggcagattgtgcggcgttataaagtaagcagcgtatccaccgtgatattttcggggaatgcctttctgccgttcagacctcccaactcgataatgaagttgatgaagatctttttggcaccacatctttgtactaaccgatgagtggccgccatggttccaccggtagccaataaatcatcgtgcagcagaactacatcgttttcattgatggcatccttatgtatttgaatggtatcggttccgtactctttagcatacgtttcttctacaacctctgcagggagtttgcccggcttacgcgccattacgaatccggctcctaaacgtgccgccagagcaccgcccataatgaagccgcgcgactctatacctactactttggtgatacctttgtccttgtacatttcatataaagtgtccagcatttcctgcaagcacccggcattcttgaacaaggttgtcacatcataaaacagaattcccggaatggggaaatctggaatttctcttaagtttgctttaagcgtttctttgctcataaccagtgttttattgttagtctattaaattacttgtttcacgtgaaacataccttgtttcaccgccccagcagaactagtaggacgttgatgtcgctaggagagatacccggtatgcggctggcttgggccaatgtttcgggatctatcttcatcagtttctgccgggcttcggtagagagcgaattcaatgagttgtagtcgaacttgcctttgatgcggatggcttccaagcgatgtatcttttctgcgatcattcgttcgcggtcaatgtatccctgatatttgatcagtacttcggaggcttcaatcacttcttctttacggtcggtaatttggtccagcatggctttgaaagccggaatgtgcccggctatattttcgatggtaatctgcggacggttcagcaggtcgattagtttgcagccatgtgtcagacgggcagtacccaaactttccaaagcatcattgattaatgcggctttgatggagaaggtcttggcaaagtcgatgatttggttcacggcttcccgtttgctgcaaagatgttcgtaacggtcttgttttaccagacctagtttgtaggcacgttcagtgaggcgcatatctgcatcgtcttgtcggagcaggatgcggtattcggcacgggaggtgaacatacgataaggttcgtccacaccttttgtaaccagatcgtcaatcaagacaccgatgtaggcctcgtcccgtcccagtgtgaacggatcgccaccgtggcagttgatgtgtgcgttgataccggcaatgattccctgtccgcctgcttcttcgtaaccggtggttccgtttacttgtccggcaaggaacaggttctttattattttcgattccaacgtatgtttcagttgggtagggtcgaagtaatcgtattcgatagcgtatcccggacgataaactaccaagtccttaaatgcaggtactttcttcaatgccgccaactgtatgtccatgggcagtgaagaagagaacccgttcaggtaaagttcctgtgtggtttctccttcgggttccaggaaaagctgatgttgcggcttgtcggggaaggttacgattttggtttctatgctgggacaataacgcggtccgatgctttggatttgtccgttgaaaaggggagagtcgggcagacctttgcgcagtacctcgtgcacctcttcgttggtaaagcaggtccagcattgcagttgtttcagcttgcgcggttcgctcatgaacgaaaaacggtggaagtcgttttcgccgtcctgtgtttccatcagctcatagtgtacgctgcgtccgtctatgcggacaggcgtaccggtcttcatacgtccggcggtgattccgtggcgggtgattgattcggtcagatggtaggaggcaggttcggccatgcgtcctcctgccagttgtttatgcccgatgtgcatcagtccgttcaggaaggttcctgcggtgagcacgatacattttgcatggaaggtcactccccagcaagtcatgactccggtcgcttcaccgttttccacgattagttcttctccagtatcttgccaaatgtgcagattgggagtcttctccagaatctcgcgccatgcccagataaacttgccgcggtcacactgggcacgggggctccacatagcgggacctttggaacggttgagcatacggaactgtatggctgtacggtctgtaaccagtcccatatagccacctaatgcgtctatctctcttacgatttgtcccttggcaattccacctacggcagggttacaactcatttgcccgattttgttcatatccatggtaatcaggcaggtcttcgaacccatgttggctgcggccgcagctgcctcacagcctgcgtgtccggcgcctattacaataacgtcgtacttaaaatccattgatttatttctttttaccgattgcaaaattacgaattttactctgtaaagcggtgataatacggttaaaaagaatgtgtggcgacagaaatctgcttctgccgccacatcatacaaacactatttctaaagtaaactatttcctgttatttcttgtccggagcaggaggggtgtcggacgggcgtttctttccgtccttgtctaccggttcaaactcctctttctccggctcattctgtgcgttttctttcgaggaaggattgacaatgttctgataggtatcatgaatgggaagcttgtctaggatacccagtgcaggagctactttgctgacgacgttctgcaagaaattagatgtcgtgccgttgccgccgtcaaaaacagtaatattccccagttgaatatgttcaaatgccttaacctgttccgaagcgatttccttccattggtcaaccatcttgtattggatggcgatttcgggattgcgttcggcagctttcaccatggcctcgaagccttctgcttcggccagcaaggacttcttcttaccttccgcttctgcctccagcttcatctggatagccttggcttccgcctgtgctttggccaggatagcttccgcttctgcatttgccttacgttttatttgctcagccaatgcgtccgcgtccaagatagcttgctgtttggctatttcggcaggaacaatcttatccgcttttaaggcctgttctactttgcgggctttcgcttcttctatctcacgctgtgcgttttcctgtgcagtgaggacggcagcttgcgttctggcctgtgcttcaccggcttttctagaggcttccgccttggtaacttccagttccgcattactttcggcaacctctttggcagcgttattttgcccgatggccgatttcttttgtgcttccgcctgctttatctccatatcggactggagctctgcagtacgactctcctgttcggtacgcgcctgttccttgttcacttccatagaggcgctggctttggcgatacgtgattctttttcggcgttttcttccgctactttcgattcacgttccttgtcggctatggctactttaatctcctcgtcacgttgcgtatcggccagttgagtgttcttgtcgcggttggtttccgctactttggtggcgcgctctttttgctgttctgcaatcttgatggcccccagtttctgctgttcttcaatgttggctaaggcttcattcttggctttcgcttcggcttcttttcccagattgacgatatagtcggcttcatcacggatgtcgctgatgttgatgttcatcaggtaaaggccgaatttcttcaattcggaatcgatgtttttgcggcagttctcaaggaatgtatcacggtcgctgttcagttgttcgatagtcatatcggcgatgaccagacgcatttgtccgtaaacaacgtctttaatcagttcctgttgtgcctcgatgttcagtcccagcaagcgttcggccgcattctgcatgacttcgggctctgtgcttacggccacagtgatggtagtgggcacatctacgcggatgttttgtttggagatggcgccggtcagtttgcagtcaatctgcatgggtttcatgttcaggaaagagtatccctggatgatgggccatacaaaagcggctcctccgtgatacagtttagccgatttcttatcgccggtcttaccatatactaccaatacctcgtcgctcttgcacttgcggtaacgacttaaaatcccgacgatggtcaggacgatgacagctaccagaatagctgcataaatgagaatctgctcatccataaatgattgcgtttttagggtttatttaatcaatataatagattccttccttgtaatccttcagtgtgaggatatcgccttcctgatagcttttaccctgtatgctccgcacggtaagttctctttgtgcaccattgatggcgatatagaccacgtattctgttcctgcctgtccttgttcctgacagcgggtatatatttcgcatttcctgcctattaattcttctccctgttcgggcttattttcttgtttcagcttatagcagagtttataaatccaagctaggacgaaaacaaaaaagctgccgcttatcacggcgcccagataatgcaagacaatgtagggaggctggcataaatacatgaaccaaccgaaacccatgcagaaatgaatcagccctttgaaggagagtacgctgctcatgtctatatcggcgttgccgtcggcattgacgtctatatcggtgtccatattgccgaaaaagatggataagatgaattgcagaagaaagattcccgtacttactaatgcagcgaaaaaatatacgttagcttccatttgagtgatatattttgtgtttatctgttttttcaattcacaaaataaagcaattaatccggaaaagcaagaagataagggaataaatgtagctgcatgtatagctttcgacgtttttatccgtccggcggaaagttttccctaactattggcatgtctttgaaaagttacgggcaatcattcgtgcgaactatgcctgtaacttttataggttgttctaccttgtatgtcctgttatagggaaaccaatgccagcgccttgttctcggcagcttccataatctcccgttcaccgggccctttgtcgttgatgccgcacaagtgcaggataccatgaataatcacccggtgaagctcgcggtcgtagggttgctcaaactgttccgcattggtgcggacagtatccagactgatgaataaatcaccggaaatgcgattaccttcgcaatagtcgaaagtgatgatatccgtgtaataatcatgttgcagatactgctggtttacttccagtattttatcgtccgagcagaagatataagcgatttctcccactctttttccatagcaggcggctacctctttaatccattcggtggtttctttctttttgatatcgggcatctttaccccatcggtttgataacttatcatagaataacaaattagaaatgacaggcaaagataggtaaagtatcttgttagcggttcactttcgggatattttctaataactttctaatctggtctgagttgattataatcggtttcacttctcatcgggaaaagggcgttgtacttttgtcacccaaaaacagaaaacaatgaaacaacgtgctattcttttcttttttataggcataatgacaggaatactgcaggcacagaccttgactctgaaagatgccggacagctttttctgaagcagaacctgtctcttattgcagcccggtatgatatggacattgctcaggcacaggtattgcaggccagactttttgagaatcccgttatctcgttagagcaaaatgtgtacaataggctgaatggaaaatactttgacatgggaaaggacggggagtcaggagtggagatagagcaggttatcagtattgccgggcagcgtagtaaccgtatccgtctggaaaaagtgaacaaggaaatggccggatatcagtttcaggaaatcatgcgcaccttgcatagtgagctgaacgaacgatttgtcgagacttattttctgactagaaatatggctgtttatgaaaaagaaataacttcgttggagcgccttctggctgagatgaaacttcaacaacagaaaggaaacatttcactgatggaagcctcgcgtctggaggccatgttgctttcattgaagaaggaaaggaatgagcaggagaatcagctggttgccgcccggggagaattgaaccttcttctgagccttcctgctgatgcgcgtcctgaactgctactggatgaaagtatgttgaaacagctggacttgtcacaactctcttatgcggacttgatggcacgtatgactggacgtcccgatttaaaactggcccgtacctatatccgtgcttcgcaggcgaaccttaaacttcagaagtcgctggcttttcccgaagtatcctttaaagggacttatgaccgtgccggtaattttatcaataattactttgctgtggggatcagtttctctgttcctatatttaaccgtaatcagggtaatataaagtcggcccgcatcgaaatcatgaaagcggataaggaaaaggagtatgccatgggaaaagcggagatggagctttttaccgcttattcgcagctggagaaggcgatgaatctttatcagtcggtggatagtgatttggagcagaactttgagaaactgatagcgggagtgaatgaaacgttccggaaacgtagtatcagtctgttggaatttatagactattatgagagttataaagaaacttgtatacagttatatgacacacgtaaggacttgcttctggctatggagaatttgaaccgagttatcggacaaaatgtatttaattattaataacttatcaatcagagaacaacaatgaatcagaatatctttttactgggcttattttttcctcttctttgtaactgttcggcaccggctgaacaaacagacacgaccaatggggggatcttcctgacagacagtttgaaacaagtagtgaccattgatactgtaagtatacaggaggtcacgatggaacttaccctgaacggtcgtgttactttcaaccaagaacaggtggcacgggtgtatcccatattcggggggacggtgacggaagtccatgcggaaacgggagattatgtgcaaaaaggtgaggttctggccgtaatccgtagcggggaagtggccgactatgagaaacagcagaaagatgctgcccaacaagtgcttaccgcccggcgtgccatggatgcgactcaggacatgtatgtttcgggcatagcttcggagcgcgatatgctccaggcaaagcaagaactggccgcagccgaggcggaggataaaagggtgaaggaagttttctccatttatcatctgttgggtaattccatttatcaagtgaagtctccggtagcgggatttattgtcaataaaaacatcagcaaagatatgcagatacgttcagaccagagtgaggaattatttactgtatcggggttggagaatgtctgggtgatggccgatgtctatgaaagtgatatcagcaaagtatgtgcaggagacagggtggagattactacactggcttatcggaacaggagtttcggaggcactatagacaaagtgtatcaggtgctgaatgacgagagtaaaacgatgagcgtgcgcataaaattgcaaaataaggattatctgctgaagccgggtatgtttaccaatgtaaaggtgacttgcaaggcatccgaggaacggatggcacggatagaccctcattcgctggtttttgagaatgggaagaattatgtggtagcggtagacggcgacggcagtcttcaggtgaaagaggtggagatttacaagcggtcggataaggaatgctatctccgttccggtgttaccggaggcgataagattcttaacaaaaatgttctgttggtttataatgctttgaatgacgattctaaatagaaggaaagtatgcataagtttattgataatatagtagctttttcactgaaaaataaattttttatatttttctgtaccacgatagcggtcattgcaggggcgatatctttcaaacatacacctgtagatgcttttcccgatgtgacgaacacgaaagtgaccataatcacccagtggccggggagaagtgcggaagaggtggagaaattcatcactatccctgttgaaatagcgatgaatcctgttcagaagaagactgatatccgttctaccactcttttcggtctgtctgttatcaatgtgatgtttgaggacgatgtcgatgatttcacagctcgccagcaggtgtataacttgttgaatgatgctgatttaccggaaggggtcactcctgaagtacagccgctttatggcccgacgggagagatttaccgctacactttgcgcagtggcaagcgtgatgtgcgcgaattgaaaacaattcaggactgggtgatagaccgcaatctccgtgctgtgccgggtgtggctgatattgtgagtttcggtggcgaggtaaagactttcgaagtcagtgtgaatccccatcaactgataaattacggtattacttcattggaactgtatgatgctattgcaaagagtaatatcaatgtcggaggagatgtgattactaagagctcacaggcctatgtggtgcgtggaatcggattaatcaatgatttggaggaaatccggaatattgtagtgaagaatatcaacggtacgcctgtattggtccgtcatttggcggatgtgcacgaatcctgtttgcccagactgggacaagtaggacgcatggaggaagatgatgtggtgcaaggcattatcgtcatgcggaaaggagaaaatccgggtgaggtgattgctgccttgaagcataaaatagcagaactgaatacagggattctgcccgaggatgtggagattgttccattctatgaccgtgagaacttagtcaatctggctgttcatacggtgactcataatcttattgagggtatattgttagttacgtttatcgttttaatttttatggcggattggcggacgacagtgattgtcggcatcgtgattccgttggcgctgctctttgcctttatctgccttagagcgatgggaatgtctgccaatctgctttctatgggagcgatagatttcggcatcatcattgatggcgccgtggtgatggtagaaggggtttttgtggcgctggacagaaaagcgtacgaggtgggaatgcctgcgttcaaccggatgtcgaaaatggggcttatccggagcactgccaaagataaggcgaaagcggtgttcttctccaaattgattattatcacagcgttggtgcctatattctcttttcagaaagtggaaggaaagatgttctctccgttggcatatacattgggattcgcactgctgggggctttgatcttcactttgacactggttcctgtcctgtcttctatgttgctgaaacgtgatgtccgtgagaggaataactgtatcgtccgttttatcaatgaaaaagcttcgttgctgttcgaccggtttcatgcccgtcgcagtctcactatcggactctctacggtggtggcggttttcggattgtggctttttactttcttgggaacggagtttcttcctcagctgaatgaaggttccatttatgtacgcgccacgcttccgcaaagcatcgctttggatgaatcggtggagctggccaacaccatgcgtcgtaaactgatggcttatcccgaagtgagacaagtgatgtcccaaaccggacgaccgaatgacggaacagatgcgaccggtttctataatattgaatttcatgtagacatctatcccgagaaagaatgggagagcaaactgaccaaactggaactgattgataagatgcagcaggatttatccatttatccgggcatcgacttcaacttctcacagcctatatcggataatgtggaggaggcggcatcgggggtaaagggctctattgcggtgaaagtgttcggcaaggacttatatgagtcacagaaacttgccgtacagattgataagattttggggactgtggaaggtattgaagatttgggagtaatccgtaacatcggccagcctgaactgcgtattgaactggatgaacagaaactggcacgatacggggtagcgaaagaagatgtgcagtccatcatcgagatggctatcggcggaaaatcggcctctttactttatgaagatgaacggaagttcaatattatggtgcgttataatccggaattccgtcagaacgaagatcagataggcaagatattggttccggccagcgatggagccatgatacctgtcaaggaattggcggatatccgtaccattacaggacccttacttattttcagggacaaccacactcgtttctgtgcggtcaaattctccgtgcggggacgggacatgggaacggcggtggcagaggcacaaaagaaagtaaatgccgcgatccatcttcctgaaggatattctttgaaatggacgggagattttgagaaccagcaacgggcgtccaagcgtttggcccaggtggttcctgtgagtatcgctattatctttgtcattctgtttgtacttttttcgaatgccagagatgcaggattggtgctgctgaatgtaccttttgcagccgtgggaggtattgccgcattgttgctgacgggatttaatttctcaatttctgcggggatcggtttcattgctttatttggtatctgtattcagaatggggtgattatgatttcggatatcaagcataatctgcatacacggctatccttgccggatgcggtgaaaacaggaatgcgctcgcgtatccgttccattgtaatgacggcggccatggcggctatcgggttgatgcctgctgccatgagtcatggcataggttccgaatcacagcgcccgctagctattgttattattggcggtttgataggagccactttttttgccttgttcgtatttccgctgattgtggagtgggtttatagcaagatgttgtatgataaagaaggtaatctgctgcaaagaaaattataatgatgtatatttgcaaccgacagaaaaacagatttgtttatggcaaaaataatattggtagaggatgagataaatattgcctcgttcattgaaagagggcttcgtgagttcggtcacgaggtctctgtggtgtacgatggtaatgcgggatgggaactgcttcagaatgagtcttttgatttgttgatattggatatcattatgccgggtatgaacgggttggaactgtgccgcatgtaccggcagcgtttcggctatcactctcctgttgttatgctgactgcgcttggaactacagacgatattgtgaaaggactggatgccggagcggatgattatctggtgaaaccgtttagctttcaggaactcgaggcgcgtatcaaggctttgctccgccggagtaaggaggttcctgtacagcaattggtttgtggggatttgattttggactgtacgttgcggcgtgctcgccggggaaacatggatattgatcttacggtaaaggaatatcggttattagagtattttttgttgcatcaaagggcggtgctttcccggcttacgctattacgtgatgtgtgggataagaattttgacaccaatacgaatgtagtggatgtatatgtgaattatttgcgcgccaaaatagataaaggttttgaggacaagttgatacatacagtggtgggtgtgggctatatgatgactgattgaaaagtatctttaggatatagagaaacttaaaagaaaggatagacatgaagattggacctaaaatagctttgttttattccctcattacgatgtgtgccattatcatggtgatgagcgtgttctatttgttcagctctcgctatatcaaccgtctgtatgagtcttatttgcgggagaaggcatttatcactgctcagaaatattgggaaaaagatgaagttgacgaacagagctatcggttaatccagcagaaatatgatgagctgctgccgcaagcaagggaagtattattgaatatggacacgttggcacacgtcaaggacacgttgggaaaatatctcaatgccagtcagcaggaaagactttttcatggtgacggtactccggtgacttttaaatataagaaagaattgggtgcggctctctattatccggataatgaaggatattttattgtctttgtcttctctgaaaacacttatggcaaggagatacaggagcatattttgctactttcggttactctcgttgtcatcagttctatttttattttttttatcgggcgtgtttattctaaccggattcttactcccctgcaacatatcttgaaagaattgaagcgtatccgcgccaataacctgaatgtacgtctgagaagctatgggaacaaggatgagctggatcagctgattgtgtcactgaatgggatgctggatcgtattgacacagcgtttaaatccgagaaatcatttgtcagcaacgcttcccatgaattgaacaacccgcttactgctattcagggggagtgcgaaatagcccttctgaaagagcgtagcacttcggaatatatggattctttggaacgtatctcggtagagagcaaacgtatttctctgctgataaagtctttgctgtttttatcccgtcaggataaggatattctagcaaatacggtagaggatgtttgcctgcctcggatgctgagggagcagtatgccggccgtcctcgtattcgtctgtcttccacacttagggaggagaatgactttattgtccgtgccaatccttatttattgggaatagcccttcagaatgtagtggataatgcctgtaaatattcggataaggatgtggaaatcagcttgttcgaaaaggagggccggagagtggtggaaatcagggaccagggtattggtattcctcaagaagaggtagaattgatttttcaatctttctatcgtgctagtaatacacgttcttacaaggggcaaggcatcgggctaagcctttctttgaaaattatatctacttacggcggccaaatgggaatccattcggaagagggacattttaccaccgtaagtataacttttcctctgtccctagccgaagaataaataacagataagaatagccgcaatcactccggccaaatcggccagtagtccgcaaggaacggcgtggcgtgtcctcactactcctacgctaccgaaatatactgccaggatataaaaggtagtgtctgtggaaccttgaaagatacaggccagtctgcctacgaaagaatcgggaccgtatgtagtcatggcatccaccatcaatccgcgtgctccgcttccactcaatggtttcatcagtgctgtggggagtgctcctacgaaatcactgtcgataccgcatagctttacggctctgtcaatgccgtcaatcaaatagtccatcgcacccgatgcacggaagacaccgatgcctaccagtatggctaccaggtaaggaatgatgcgtatggcagtgttgaatccttctttggccccttcaacaaaggagtcgtagacattgattttttttctgatccctgctacaatgaagccgatgatgataagaaatagaaagacattggcaaaggtagtggagtaaatatctatctggtttcgtgacaaggtattgaagaaataaataattcctgctaccagcaaactcattccccctaagaagaagaggatggtacggttaaacaggttgattctctgataaatgcttacagcgacaatacctgccaaggtagagaagaaggttgccagcaggatggggacaaatatgtctgtaggttgggcagcacctagttgagcgcgatataccatgatgctgataggaatcagagtcagccccgaagtattcagtaccaggaacataatcatgggattactggcagtatctttcttggggttcagttcttgcaggccctccattgctttcagtcctaagggagtggcggcattatctagtcccagcatattggctgccagattcataaagatgctacctgtcacaggatgtcctttggggatatcgggaaaaagtttactgaacagaggtcccagcaatcgggaaaacagagcgatgactccgccttgttcgcctattctcatgatacccagccaaagggaaaggacaccggtcagtcccagtgaaatttcaaatgcagttttggaagaactgaaagtagagttgataatttcgggaaacacttgtgtgtcgccaaggaaaacgagtcgcatcaacgctactacgaaggctatcagaaaaaaggctatccaaatgtagttcagaaccatatcgctagttttattagtaataactcggacaaaagtagtcaatttattcgtttttgaattagaaaagattcaattctcttatttttatttccaatctttgtttgaacacgatagcaaaatagtatgaaatgattttaagagcaaactactctctcatttgattatttcgatgaacgggacgagaaggaagcgtttaagcgattctcgcgagtttgaagaatatcaaaaagagtaaaaagacgtttgatggtttgctatttgtcgggtatataaagaaaaatgttctttatggatttaaatatgctttgaaatggatactaatgagatgtaaaataactcttgaaataagtctgttctagaagaaacggataatataagaatcgaaatagttaggaaaaagagttttgttgatcggatctgataataaaaggttatatttgtgcaaatatgtagtgtgaattctgtagtagaaggagggcattgatgtaataacaagtaatatgggagaatatatgatgaaaaccgaggaaataaaagattagttcaagcagtttgaaagtatcgtttgtgattatcatggagtagagtgttggagtgcacgcgagttgtattccttattgggttatacccagtggagaaactttgaggctatcatcaataaagcgaaagctgcttgcacgaatgcaggtgaagatgtgacctatcattttgctgacgtcagcaaaatgataagtttacctaaaggtgcagaaagagagatagatgatatctatcttacccgttatgcctgttatttgactgctcaaaatggtgatgcgcgtaaaccggctatagcttttgctcaaaactactttgctgttcagacaaggcgtgcagaattggtggaacaacatctgttggattatgagcgggttcaagcacggactaaattgactgaaacggaaaagctgttatcgggtgtgttttatgaacgcggagtagatagtaaaggttttgccattatccgttcaaaaggagataaagccttgtttcgtcttgacacagcgttgctaaaatgtaaacttggtgcgccccacagtcgtccgctggtcgatttcttaccaaccatcagcattaaggcaaaagattttgctgctgagatgacttctattaacgtacaacaaaaagatctttatggacagtcatcaattgaaaaagaacatattgagaataatacggctgttcggaatatgatggggtaagccgaggaatctatccggaacaattgcctgcaggcgaagatttaaagaaagtagaacaccgtttgaaatcagaagaaaagaaaataactaagaaataatgaaggaaccgcttgaggagaaactataaatgagctgaaacggtttgctcactttcacatgcttcagtaaataattcttgtgatgtctggttaggcaaaatagaacttttagccatatactctttattattggcataaataaagagtacgcttcccccttttatcgtattgataataggtttggtcagtgcctgtggcaaagccggacaaccgaaactccgtcctaatctacccgatttgcaaacggatggattggcgtatgcggcgccatgaaccacaatggcacgttcacgggcccggtcatttatgcctttttccagcccgtctaataaaagagagtatccgtttttaccttgatatgtgtttccggtaagatagaagccgagggaacttttataagagccgacttcgttggagaaagaggtagcatagttctcgccgctgttttttccatgagagaccactgatgagtatagcatctttttctgttccatatcaaagacaaacaaacgtttttcggtagagggtttggtgaaatcaatcaatgtcagtatggatttgcttttttgtttaatcaagttgtatcctgccacagcctgtcggaatgccaggaaattgaccacccctcccaattgcatatcttcaaataattgttcgccgtccattttttgaggtgcagggacagatgtagcaactttcttttcgggtgtagccgtccgggtcgatacattgctcgacggaaagaggaataggaacaggagtaaaaaagttttttgcatgcgtatggaaaaactggataacgggtgcaaagttacgcacatttctattccaaaacaaatataatcgtctcattaacaggtgcccattcgaaaataaacttggcatgagaggtggcatttcttacacacatatgtgagcgggggatggtacccaacgtataactgtattctatgatccctgttgccggcgcattggtgggcactccgtggatataaccaccattattgaaacgactggcgtaaggtgcaaaaccaccggtggcggcagaaccgtcttttagaaaaatcattttagtctttttctcttgtagaacgaacatacccaatggagtttcttgggcgtatggaggacgatgttgtcctgttgtagcaggattcatgctacgtatcagccagcagcccttttctttccgttccaaagtagttatattctgattatggcggtctataaaaatagctttgttgaacactacgctgtcgggaatcagttttatatattttgccggagcataccattcaccacctataaagacaggttctactttggtaaattttccttcctcacctaggtgacgggtaagaagtccatctagtccgtagcgtttggcagtaagggtgtcatctgttaggaaaagaggaattccctgatagcgttccactcccaatgtgtcggctatccgtttgtatgcgtcccttttaaaatttttcactaaaggtgcttctccgttccggtttttataattctgtaagatacaccattgtgtcggctttctctggatgttctccaacagcgccagtcgttcctttattttttcccattggaaatgacgggtggtgtctttataaggataggtatcctccaaagtatgtttatcatacagcagttccttgtcaagcctgatgtcttcgggtttgatatctttttctacaatttcggcaatggcttctgtcacagtattgtgtacctctgttatcacttccttaatttcactatttgctttcgaggtacatgagcagattgtacagaaaccagtcaataaatatatgaattctattcttttcatcatagacacaggtttatggctttcttctacaaatataattctttaaaaggaataaacatgcgtttttgtttttaaatgcagtgaaaaattcctgtttctttgaacaatctcccctattgcagaccttataaaagaccgctgggaataatcgcttatcttggcttgaggtttttacagaaaaaaagaatcaacttaaaaacaagtattatggtggaatcaactagagtaagaagtaaaagattatccttttcaggtaagaagacactgtcttcctttatgcaagtgaatattgccagtctgagacaatcgggaaaattgcgtaccagtgagacgtatagagctacactgaacagttttatgaaatttatggatggcaaggatgttctgttgagcaatatggatgccgagttgatgatggggtatgaaacttatttaaaggcgcagggagcaagtatgaacaccgtttctttttatatgcgtattttgcgtgcaacgtataatcgtgcagtagataaaggggtgatcagacagcgttttccttttaagcatgtctatacgggagtggaaaaaacggtgaagcgggctatttcttttaaagtaatcagacaactgaaggagatggatttaagtcactctcagtcaatggagtttgcgcgtgatatgtttatgttcagtttttatactcggggaatgtcatttgtggacatggcttttcttaaaaaaacagatttaaataatggtatgctgacttataggagaaagaaaaccggtcagttgctttccatcagatgggagaaatgtatgcaggatatagtggataaatatcctggaaacttctcgacttatcttcttcctattataattcatatcagaaaagatgaaagattacaatataaaaattccatctgcttggtaaacagaaggctaaaagaaataggaaaaaagttagggcttgttcatcctctgactatgtatgtggcgcgccattcatgggccagtgttgccagaggcaaacatattcctctttctgtaataagtgaaggaatgggacatgattcggaaaaaacgactttgatttatctggcagcattggataccaccgtgatagacaaagcgaatatggtggtgctgagagaattcttgtgataatagggtaaagatattgtttcttgtcaaaaagaggatatcatatcacagggtatcctccatttgacgggaccagtgtgtccagtgttttttcaataaattagtgtttgttctttctaaagatgatagcaatttctgatgtggctgagttgaatatgcttgttgcaaggtcggaacagcatgatctctttatgttatcttttgtcagaagatgctgttatagtaaaggaaaatcggattacagatagatcctgaaagaattgccataaaccatcatgctgttttcgtccacccatttgttgtgaaaaaaatatcagttcccaaatattcaggatttttccgtaatatgatgattgtcataggtttgtttttatatgaattatagttgatacaactatattttagtggataaacttgaataaaagaaaaggcaaagtttacctagattttattctttgattttggagataatcctcttattacaagtactttatacaaaaaacaccaagttaaaatattgtatatctcttattaagagatatgttacgcacacataatacactataaatcaacgaactatattaatataagaatacttcagaagactaaatcttgtattcaaaaaacgttttttttgaatcaattattaaatttcctcgctaaattgttctaattctcaaaactttgcttaaatttgcgacaaaatatatatctcttaataagagatctatcgtataactgatgacatgctatataataatgtatagttgtgaagatgttgaagtgaagattaaaagtaaataaaaatatggactatctattcttgagacgacacagacggactgctacttcgaagaggcagaaaaacctgcttcttaaggctgctgaacgccagtgggaactacagttcgccaacaagggggctgaagggagaaaggtggattgtaccctatataaatgtatattgtacaaccttgaaataaagcaagtctttttggattcggagctttctttgaaaaagtttagcgtaatgatagacaccaaccaaacttacctatcgaatgtggtaaacaagtatttcaactgcaatttgaaggagttgttgaatacctaccgtgtggaatatgctaaagagttactccatgctgggaaatgttcattagaggaactcccacagcgatgtggttttgcctctagaagtgctttttatgcctcttttagtaaaatagtcggaatgtctcctttgcgctttctagctcgtgaacagaataattcgctcttagaatcaatgatttatgtataatcaattttagttttttaaatttataaatttaaagtttttctattatgaacaaaaagtttttaagtgcaatcctgttcggtgccttaatggtgacctcgacaggaacatttgtatcttgtaaggactatgatgatgacatcgacagcttaaacgagaaagtggataagctgactaaagatttgtctgaattacaggccgcagctggaaaatatgtcacagctgtcaagtatgatgcggcaacaggtaagttgactgttaccggcggtaacggtgaaactttccaacttccgatgcctgctgaacttcccacttactctttgaaagttgtagatggtaagatacagttgttagatggtgacaaggtcgtttctgaagcaaccctgcctacaactgatgttcctgcgacatttgatcctactttgttgaagtggaacaatggctatctgtattatggagatgtaaaaatctcaggtgtagagaaacctcaaagcgttggttctattacagaagtgaaagatgaagaaactggtgaggtgattggttatgtcattgaactagatggcaaatctgctacattctctgtcgtaactgatttgaaagctttggtatttgaaccggaactgtactatcagggtattgaagcaattgctgtaaaatcatttgtttacaaggctttgactgctacagatgtaaatgcagatgctgataataaagatgatgctcctgtaaaagaaactgtaacaactgaggtcactcctgaattatctgctacataccacatgaacccatctacagctgatgttcgtaatttggttaaagaagatttgaaattcttggcttacgataaagaatatgctcgtgctgccgatggagtggtagttccagagatttctaaggttgaacctaaaaatggtgagttgactgtttgggctaagttgactgaaggaactattaaagatattgcgaatgacaacaaagtaacagttttggctttacaggccaattatttgaatggtgataacaaacgctcggttatcacttctgattatgctgcagttaaggctgttaagattacagatttagttttgaataatgcaaaagttgccggtgaaaatcatttggctgttaaagctgccgatgctatccaaaatgctcctgaagtaaaagtagcttgggatgaaacagttgatttggcagaatatgttcagactcattatggtgcaggtgatgctcatactaagtgggatgaaaatgcagcgtctggtacagtagaaaaagccggcttcagctattcttatgaattggtaggttatattgatggtagtaacaaaacttctcaaagtgcacatgccgcattgaaaggctctgttttgagacctcagttgccgaaagatggtaaagctgctgaatggggagctacagaacaaaatcaagctactgtagggcgtatgccgttggttcgtgtattcttgaatgataataactctaagaagaaagtagctgtaggttacttgaaggtggaaattacaggtgctcctgctgaagaccgtattactgcgacaacagaatatacattcaatgaagaatttacattgagctgtagaacagaggattgggttcaggaggtaacttggttccagattgaagaacaaattttggctcagctgaatatctctaaggaagatttcgaaagaagttatatctatgacggaccgatgattcaatatagtgaagcaactttggatgctatgcctttgactaaactgtctactaaggttgaacaaactgaggctgatgttgaaggtacaatgactgaagttttgcaatggactattcctgcaaactatgcttatgaatatttcagtgcaaatgcttcaatgaaggctattgttcgttacaccaaagagaacaaagacattcagggcaatgttatttctaacgattatgtatatgtaacattgacttggactcctaatcctcgtaatgtaaccccgactggtactttggcaaattctgataagactaaacaaatctggtttgctagcaattctaatgaaggaggttcaggctatgatgaaatccatgtaaacactgaagttcctgctgcaacaggtcatgatatcatgcgctttaataaattcattttggatacctttaatggtcatgatgttacaatttctgaaatagcttctgtttatacagactttgcagatgctgaactgactaagactttcagatttgttgatccgaaggatgctaaaatgactggtgtatctggaacaatttatacactgagtgtaaacgctgatcgtactcagttgttagctagtactccaactattgcaaatacagtcattgcgactattactgatgctgtagataataatggagaagatcttatcgcattggctaacaatgatattgctaaagatttgttgaatgttgccggtcgtgatgcattggctgacaacctgactgctagactttctgttgaaacagtaaatgaatgtggcaagtcattgaatgcggtagcaaacaatgaattcgacgttaagttcttgcgtcctatcactgtagaagctgataagatggataactttaaggatggtgtagacgttggtgcagaaggctctaagattgatcttaagttggcattcactgactggagaaatgaagcattcaagattgctccgattaactattatacatattatggtgttaaatcagttactattgatacaaaggaggctgagactaccataaatggtaaatatgaaccgatccctgccaatttacaggttaaatacgatggtgttactacagaagaaattgccaagggcaactttggtacattgacttatatcaacaataaagttgaagtaggtgagtttgatatcaaacttcctgtagtagttgaatatgcgtggggtacagtaaaatttgatattgtatgtcatgtagctaagactgtaggataaactgagtgagtaactctatttataataaacttgaagaaaagagtgctttcgggcactctttttttctctttacattatagtacgtatgagaaaaactaatttgttgattcttgggcttgcttcaatactcattgtttcgtgtggtcagggtggtaagaaagaggaaagagacgatccatctactgtaaaacaaactatggctttgagtaagaaagatactataaaggtattggaacttactaatcagtttatgaccgcagtaaaggagcagcgatatgctgatgcagctattatgctgcacgaaacgaaagcggatgatccttttgctcagccggaacttttggataatactcagttaaagagtgtgttgcataggctgaaagctttcccgatatacgattatagcattactgactatatttttaaagaagctcttgataatgaagtccgttgtaaggtgattttgtttcccaaaaatgatgagaaagatacacgtcccaatactactacctggtattttaagccggttcgttttctaggggagtggaagctttgttttagaagcagtacacagggggatcgtacttttgacgcttccaattaaaaatgctattgtgaggaattaaagatagtttaggtaaatatcttctaaatatgcaggtgctgatttaaaattagtacctgtttttttatgcataataaagatgcactgtctatagaatacaaaaacttttttctcttttcatccacttcaaaagaaccttttctatctttgtgcagatttgcgtgtaacgaattgcttatttccatcttttatttatcgggaaatatccgtcattcatcggggaaagaacgtgcatttatagaaatactctttctgtattgccttcatttgatgaactttgtgaccgtaatcctcgattatcaatcattaaaagaaagaacaatgaaaacaaaacaaaaaattcagttcaacagaggacatgcgtctgtaaagtacttgatagcatttctctttatcgcctgcggaggactccttttggcacgtaatatgcaatggatcacagttcccgtttatgacctgctggtatcctggcaggcagttgtggcagtagtcggcgtttattcattggtacgtcgtcatttagtgttcggactgatattactgggtatcagtgcctactacttgaatgatcagctcagcgctttgtgtggtacggatatgcaggcatttatgctgcctgctattctgattctgataggaattgtcactgtttttagtcatggtgggaaatctagagaccatgggtacggtcgaactccggaagaatttaaaacgatgaattatacctcggcagatggctttttgcattcggagaatgctttcagcggagtccgtcaggtcatattggatgaaatgttgaaggggggaagtattcagacccgctttggcggcagcatcattgacatgcgacgtacggacattcccgtaggagagacaccgttggatgtagattgtaaatttgggggcattgaactctatgtgcctgcggactggaccataaaatgtctttgcagcacattcatgggcggttatgaggataaacgttgggagagagaggaaaatcctcaaaaggtgctggtgataagggggactctttcgtggagtggcttggtcgttaaaaattaagacgggcggaatatggatacacatcctatacaggcgtcgccgcaaaggtggatagttgctttgggcttgctgctggttgccggcgtacaaggccttttcctgtgggggtacacagacgatggtatatgggtttccttgttggacggaatggctgcaactctgctgtttgccctatcggcttattgggcatggtatgttctcggctttgtccatatttccattactacgctttttatcactatattaggcatatcttgtactttggtgggcagtttctttatccggtggatcttggagtttattaatcatgcagtctacactccttttatactcacacttcctttccgcctctgttatgtggccttactgtggagcatcatcctgttatggtatcgtttgcaatctgctgcgggcgagcgtgaggagatggaaaatcaattggtaaccatgcaggaaacctggatggaagaccgcaggaaagcggaggccagccggaagaaagaggaagaagccggtgcggatgcggaagactgcctggatcggatcacagtgaaagatgggactaaaattcatttgatagaattggcggacttgctttatattcagtcttgtggcgactatgtgacattgattactcctgaaggggagtatattaaagaacagacgatgaaatattttgaaactcatctgcctggatcagactttgtccgtatccatcgttcggccatcgttcaggttaagcagatatcccgtctggaattgttcggcaaggagtcttatcaactgatcttaaaaaacggtcgaaagctgaaagtcagtaatagtggctaccgtttgctgaaagagcgcttaaatctctaatttatattgttaggtaatatggccggaaggaaaaggggagggtgacatgtgtggaactgtcttgtaacaggaatgaaatccgtttgtcatgaaacctttaatagagtgtaactctcacgaaacttaacccatctacttttgcgacagatttataacgcataaaaaagtatatgaaaaaggttgttagagctgtgtctcttatgctactgatggcaggtgtttgtggaaatgcatttgccgaggaaaatgaaaacattgtccggcaaggcactattcgcggacgtgtgatagacaatggaaaacaaattctaccgggtgcttccatctttattgagaatctgaaaaccggagtgatcagtgatgtgaacggtttctacacattacccaatctgaagcccggcacttacaccgtcaaagtgacctatgtaggttatagccctattgaaatgaaagttaccgttcccgaaggcaagactttagagaaagatatagtgatgaatgaaggggtggaactgcaggaagtgcaggtgaagggagcttttcaagggcagaagaaagcaatcaatacacaaaaaaataatctgggtatcaccaatatcgtatctgccgaccaagtagggaaatttcccgactcaaacataggtgatgcattgaaacgtatcagtggcatcaatgtgcaatacgatcaaggcgaggcccgttttggacaagtccgcggcactagtgccgatttaagctccgtcaccattaatggtaatcgtgtcccatctgctgagggggatactcgtaacgtgcagttggacttgattcctgccgatatgattcagaccatcgaagtaagcaaagtcgttacacccgatatggacggcgatgctatcggtggttccatcaatctggtaactaaaaattctccttataaacgtactatcaatgccacagcgggaagtggttacaattggatcagcgaaaaagcccagttgaatttaggcttcacttacggagaccgtttcttcaatgacagactgggcatgttgctctccgcttcttatcagaatgctccttccggttcttatgatactgaattcatgtgggaacaaaatgaggatggcaaagtatatgtcagcgattatcagatgcgtcagtactttgtcacccgtgaacgtcaaagttattcggcggcttttgacttcgaactcaatgaaaaccataaattgactttcaagggtatttttaacaaccgcaatgactgggaaaaccgttaccgtaccaatatcaaggatttggatgagaacggaaaaggcacagtccgcatccaaaccaaagctggtactcccgataatcgcaatgcccgtctggagcgtcagcgtaccatggatttcgctttgggcggagaacacttatggggagcaatcggcatggattggaatgccagttatgcaaaagctacagaagaacgccctaatgagcgttatcttgacttccaactgaaaaagcaggaatttgatatggacttgagtgatgaacgccagccgttggcaacacccacagcaggttctaccctgacactgagtgataagttcagcttgaaagaactgacagaacaacaggaagacatcaaagaagaggatatgaaattttcggccaatttcaaaaccagtttgaataatggagccaaactgaagttcggtgcgaaagtagtacgtaaaacgaaagaaaaagaaatagacttctacgaatatactccgaaagacgaggatgccttcatgaccaacagcctgaaaaatacggtagaccagagtacggataaatttatgccgagcgacaaatatcaggtaggaacatttgccagtaaagaatatgtgggtggattgaacttaaatgatgcttcccaattcgataaagaacaggtacaagccgaattggctgagaactttgaggctcgtgaaactgtaagttccgggtatgtacgatttgaccataaatttacctctgatataaacttgatggcagggctccgcatggagcacacttctcttcgttataccggtcgtaactatgatgatgaaacagataagaccaccaagaccggccgcgtcgtcaacagttatgtgaatttccttccttctattttggtgaaatgggatgtaaatgatgatttcaagatacgcggttcttacacgcagaccttgagccgccccaaatattcagctttggttcccagcgtgaatatcaaccgtggcgataatgaaataaagattggtaactctgacctgaaacctactatttcttacaacttcgatttgagtgccgattattatttcaagagtgtaggtttggtgagcgcaggctttttctataagaaaatagacgatttcatcgtagatcaggtactgaccaactatgaataccaaggaacagaatatacccgtttcactcagcccaagaatgcaggaaatgctaatctgtggggattggaattttcttatcagcgtgatttcggcttcattgctccggccttgaagtatgtgggtttctatggaacctatacttatactcactcacgtgtggaggactttaacttcgaaggacgtgagaacgagagcgggttgagtttgccggggtctcccgagcatacggcgaatgcctctctttactttgaaaaaggaggcttgaatgtgcgcctgagctataactatgcctccagttttatcgatgaaatgggcccaagtacattttatgacagatattatgatgccgtgaactatatggatgtgaacgccagttatacctttggcaagaaggtgaagatgaccttttatgctgaggcgaacaatctgctgaaccagccgctccgttactaccagggtacgaaggaccgtactatgcaggcagaatattatggcgtgagaatgaatgcaggtttaaaaataaatttctaaaaattaagtatatgaaaacgttgatgatgattagaaaaatgaaagaagtattgacatgggtatggattgttgtcattggtgcggctatctgcctgaatgtgtgtgcccagactccacaagattggaaaggactggagaaacaactgaatttttatatggctaacgatttgggacgtaacggttattatgaccagaagcccatagccgagctgatgggagaaatggcggatgttattggtcccgagtgtgtgtttgcagctggagacgtgcaccactttgaaggtgtacgcagcgttaacgatccgctttggatgaccaactacgagttgatttacagccatcccgaactgatgatagactggttcccgatcttgggaaatcatgaataccggggtaatacgcaggctgtgttggattataccaatgtgagtcgtcgctggtcgatgcctggtcgttattataccaaagtttttgagaagaaaggaactgccatccgttttgtgatgatagataccgctcctctgattgacaaataccgtaacgagagcgaaacttatccggatgcctgcaaacaggacatggacaagcaactggcatggatagactctgtgcttactgctgccaaagaagattgggttgtcgtaatagggcatcatcccatttatgctgaaacgtcgaaagacgacagtgaacgcagcgatatgcagaaacgtctggatcctatcctccgtaaacataaggtggatatctatgcatgcggacacattcataacttccagcatcttcgtgtgccgggcagtgatatcgactatgtggtaaattcggcaggttcgttgagccgtaaggtaaaaccagtggaaggcactcagttctgcagtcccgaaccgggcttttctatcttcacggcagacaagaaagaactggatatgcatatgattgataagaaaggaaaagtaatctatactgtaaaacgcaccaaatagggatagttattttagggaaaaagagtacatttgcggtgtaaaactgtaaatgtactctttgttatgttgaatacactccttttgattggtggtctggctcttattttggctggtgcaaatggcttgacagatggttctgcagcggttgccaaacgtttccgtatttctgatttggtaatcgggcttaccattgtagcttttggcacttcggctcccgaattggttatcagtgtgctttctgcattgaatggcagtgctgaaatggctattggtaatgtggtgggtagtaatatattcaatgctttgatgattataggctgtactgcgttggtactccccataaaagtaggtgaggggacgatgagtaaagagattccgttagtcattctttcttcattggtactgtttgtctgtgccaatgacatgatgctggacagggaagcggtcaatgttatcagccgttccgatgggtttgttctgttggctttcttccttatatttatgcgttatacatttgctatcgctcgtaatggggcagatgaggcaggagaagagcagaagattaaggaaatgcctgtatggaaatcggtgttgtatattgcaggaggactggccgggctcatatttggcggacagctttttgtcgacggggcaagcgggcttgcccgttcatggggtgtcagtgaatcggtaatcggactgacattggtagccggaggtacttccttgccggagcttgctacatctgttacggcagctttaaagaagaatccgggaattgctatcggcaatgtcatcggtagcaatctgttcaatatattctttgtactggggtgcagcgctacggtatcaccgcttccgatggggaatataaataatctcgatttaagtgtgctgattgcttcctccctgttgttgtggctggtaggctggtttttccgtaaacgtaccataacccgtcttgaaggcgcattgatggttggctgttatgtcgtttataccgcctatcttattgcccaacagtaaaaaagccataaaaagaataagttatctgcaaaaaaacttctatctttacaccctgaatttttataaaaatacagcatggctattaccattaaaaaagtcagttcaaagaaagaacttaagacatttatacggttcaactacgagttatacaaagagaatccttattccgtacccgacttgtacgatgatatgctgaatacgttcagcccgaagaagaatgccgctttcgagttttgtgaggcggagtattttctggcatataaggataacaaggtggtaggacgtattgcagggattataaataaacgcgcaaacgagacttggaataaaaaagaagtccgtttcggatggatcgatttcctggatgatatcgaaatatcacgcgccttgttggacgcagtagcccaatggggtaaatcgaagggaatggataccattcagggacctttgggctttacagactttgatgcggaaggcatgttggtagaaggcttcgaccaactgagtaccatggcgactatctataattatccctattatccacagcacatggagaagttgggattcgagaaggatgccgattgggtggaatataaaatttatattccggatgcgattcctgataagcataagcgtatcagcgacttgattcaacgcaagtttaacctgaaggtgaagaaatatacatcgggcaagaagatcgcggccgaatatggtcaagcaatctttgagttgatgaatgaggcatacgctccgctttatggtttctcggctttatcacaggggcagatcaaccagtatataaagatgtatttgcctattgtagatttgcgtatggtgaccttggtgaccgatgctgaagataaactggtggcggtgggtatttcaatgccttctttgtccgaagcgttacgaaaagcgaaggggcgtttgctgcctatgggctggtatcatttgctgaaagtgctgtttttgcataaatatccccctatgctggacttgttgttggttgctgtaaagcctgagtatcagaacaaaggagtcaatgctttgttattctcggacttgattcctgtatatcagcaactgggattcaagtatgccgaaagtaatccggaactggaactgaatggaaaagtgcaggcccagtgggaatatttcaagaccgagcagcataaacgccgtcgtgcttataaaaaaagtattctgtaacaacgatatataaaaatgtgataagtcaatatggaagaaaacaacgaactgataaacaatcccgctgtagaatataccgacgataacatccgccacctcagtgacatggagcatgtgcgtacccgtcccggtatgtatattggaaagttgggtgacggatcacatgccgaggacggtatctacgtccttctgaaagaagttctcgacaacagtatcgatgaattcaaaatgcaggcgggtaaaaagattgagattatcattgaagaaaatctccgtgtcagcgtgcgtgactatggtcggggtattccgcagggaaaacttattgaggctgtaagtgtgctgaatacgggaggtaaatatgacagtaaggcgtttaagaagagtgtcggactgaatggggtcggtgtgaaagctgtcaacgcgttgagctcgcgcttcgaggtgcgcagttaccgtgacgggaaggtacgtatcgctacctttgccaaaggcgacttgctgacagataccacacaggatacaacagaggagaacggtacatttatattctttgagccggatcgtctgttattcgagaattatagcttccgtccggagtttgtggaaaccatgctccgcaattatacctatctgaatacaggactggccattatctataacggtcagcgtatcttgtcccgtaacgggttggtggatttgcttaacgacaacatgacggctgtgggattatatcccatcatccatttgaaaggggaagatattgagatagcctttacgcataccggccagtatggtgaagagtattactcttttgtcaacggacagcatacgactcagggaggtacgcatcaaagtgctttcaaagagcatattgcccgtaccatcaaggaatatttcaacaaaaacatggattattccgatatccgtaacggactggtggctgccattgccgtcaatgtggaggaaccgttgttcgaaagtcagactaaaatcaagctgggctctaccaatatggctcccggtggtcctaccgtcaataaatttgtaggtgattttgtaaagactgaggtcgataactatctgcacaagcatacggacgtggccgatgtgatgttgcagaagattcaggagtcggagaaagagcgtaaagcgatagccggagtgacgaaactggcacgtgagcgagccaagaaggcaaatcttcataaccggaagttacgtgactgccgctttcatctgaacgatgtcaaaggggacaagaaggaggaaagctgcatcttcattaccgagggagactcggcaagcggttctatcaccaagagccgtgatgtaaatactcaggcagtattcagtttgcgtggtaagccgttgaattcttacgggctgaccaagaagattgtatatgagaatgaagagtttaacctgcttcaggctgctctgaacatagaggacggtatggaaggattacgatataataaggtaattgtggctacagatgctgatgtagacggtatgcacatccgtttattgcttattactttcttcctgcaattcttccctgacttgataaagaaaggtcatgtatatatccttcaaacccctttattccgtgtccgcaaccgcaagaaaggagtttatgaaaccgtatattgttattcggaagaagaacggattgccgctatcgaacggttaagccccaatcccgaaattacccgattcaaaggtttgggagagatctcacccgatgaattcaagcactttatcggcaaagacatgcgtctggagcaagtttccctccgcaagactgacctggtgaaagaattgctggagttttatatgggtaagaacaccatggaacgtcagaattttattatagataaccttgttatagaagaagacattgcgtgaatcactaacaaatatgagaagagccatatttccggggacatttgatccctttaccatcggccattattcggtcgtgaaaagagcattgacctttatggatgaagtggtaatcggtatcggtatcaatgagaataagaagacttggtttcctacagagaaacgagtggagatgattgagaaactttttgctgatgatccccgggtaaaggtcgacgcttacgattgtttgaccatagactttgccagagctaaagaagcgcagttcattgttcgtggaatccgcaccgtacacgattttgaatatgaggaaaccatagccgatatcaaccggaaactggccggtatagaaactattctgttatttacggagccggaacttacttctatcagctctactattgtgagagaattattgcagtttggtaaagacgtaacaccattcttgcctgaaggaatgaaaatagactgatcatgaaatatactatgtactttgcaggcttgattgcctgctttttttctattgtagccgcacaggctcaggaaaataagtttctgaattctccggcacgcaaattacagttggcggagtttgccattgccaacctttatgtagacgaagtcaatgaggggaaactcgtagaggaagccatcgtaaaaatgttggaacagcttgatcctcactctacttattccgacccggaggaagtgaagaaaatgaacgagccgttgcagggaaactttgaaggtatcggcatacagttcaatatggcagaagatacattgttggtgatacagcccgtatcgggcggtccttccgaaaaagcaggtattctggccggcgatcgtatcgtcatggtggaagatacgctgatagccggtgtaaagatgagcaccgaagatatcatgcgtcgtcttcgtggtcctaaagattcaaaagtgaatttgaaaatacttcgccgaggggtgaaggaactgctcccttttacggtgaaaagggataaaatacctgtttacagcctggatgcttcctatataattaaagataagattggttatatccgtatcaaccgttttgccgccactacccatgaggagttcaagaaagcgttagctgaattgcagaaaaaagggatgaaagatttgattcttgatttgcaaggcaatggcggaggttatttgaacgctgccatcgatattgccaacgagtttctgggcaaaaaggaactgatagtctatacggaaggccgtcgtaatccccgtagtgaattttttgctaaaggtacgggcgagttccagaatggtcgtctgattgtattggtcgatgaattctcggcttctgccagtgagattgtgacgggagctgttcaggattgggacagaggagtcgttgtgggccggcgcagctttggtaaaggcttggtacagcgtcccattgatttgccggacgggtcgatgattcgtttgacggtggcccgttattatactcctgccggacgttgtatccagaaaccttacgaaagcattgaaaagtataatgaggacctgatagaccgttataataaaggagagatgatgagtgaagacagcattcacttcccggattcactgaagttcaagactcataagctggctcgtacggtatatggcggtgggggaattatgcccgattattttgtgccgattgatacgactctctatactaaatatcatcgtcagttgcgtgataaaggggcgttgatgaaagctcactttcattttattgatgcccatcgtaaagaatggctgggcaaatacaagactttcaatgaattctacaaacgttttgaagtgactccggatatgttggcacaactggttgctaccggcaaggagatgggagtggaatataatgaagaagaataccagaaggcccttcctttgctgaaattgcagatgaaagcattgatagcccgtgatttatgggatatgaatgagtattatcacgtcatcaatgatgccaatgaaagtatcaagaaagcactggagctgctggaacaaccggattttgaaggattgctgctaaaaaaacgatagtcaagactttatattaactgcaggggcgcatagttgcactcctgcatccaaccatcactttatctgtcttccgaacagcaccttattcagccatcggtttacataaatatttgcaaaagcgcatcctactccgatcgctgctcctgccactacatcactgggataatgcactccttggttcattcgtgcaaaccccactccacaggcccatacggcagaaggagcgatgacataccatttgggataagtgatagaaagcgaagttgccagggaaaaagcggcggctgtgtgtcctgaaggaaacgacgggctgtctgcatccggtgctccgtatgcatgaatcttatccggatactttacaaaaggccggtcacgtcctatgatatgtttggcagcgtatgtgatacctaccgcctcaatcacactggttcctatgtaaacggcatctttcagcatcggctggtctttctttatcaatgcatagagtcccatggcggcaggcactcctacgggcagaatcattccgctggcggatagtcctctgctgaggccgtgtaccttccatttattgatggttctcaatgtgttgatatctatattctgggccgggaggctgaatgtaaaacttactgtcaacaagaggaaaataattcttcgtatatccattttgtttggtttttgttcggtacaaagatagaaaaataatgtaattcgcatttacccttccccgaattaaagaataatttccataattccttgtattatcgctagaattcctttacttttgcatcgtgaatacacagcttttaacagaatttttagttctaacaattaaataatttaaattcaatcatttatgtggttaagtaattcatctattggaaggaaagtggtgatgagtgtcacaggtatcgcccttgtcctgtttctgacgtttcacatggcgatgaaccttgttgcgctcttctcggaagatgcttacaacatgatttgtgaattcttgggagctaactggtacgcgttggttgcaactgccggactggctgctctgttcgtaatccacatcatctacgctttctggttgaccatgcagaaccgtgcagctcgtggtagcgaacgctatgcagtgaacgttaaacctaaaactgtggaatgggcatctcagaacatgcttgtcctgggtattatcgtcattgccggattggctcttcactttgccaatttctggtacaaaatgcagtttgccgaaatcatcggtgttcatgatttaggtgcgttcggccctacagacggtgccgcttacatccgtgaaacattcggatgccctgtatttacagtgctttacctcatttggttagcagctttatggttccacctgactcacggattctggagcgctttgcagacattgggctggagcaacaaaatctggttcgagcgttggaagactattggtaacatctactctactttggtagttcttggttttgcagcagtagtcgttatctacttcgtaaaatcactcgcttgtggtgcttgctaatcgtaaattgtaaatgataaaattgtaaatgaatatggctactatagattctaaaattcctgaaggcgctttagccgagaaatggaccaattataaagctcatcaaaaattggtaaaccctgccaacaaacgtcgtcttgacattattgtggtaggtaccggtttggcaggtgcttcggctgctgcttcactgggtgctctgggtttcaaggtattaaacttctgtatccaggactctccccgtcgtgcacactccatcgctgcacagggaggtatcaatgctgctaagaattatcaaaatgatggtgactccgtttaccgtcttttctacgatacaattaaaggtggtgactatcgtgcacgcgaagctaacgtttaccgtctggccgaagtgtcaaatgctattatcgaccagtgcgtagctcaaggtgttcctttcgctcgcgaatacggtggtttgcttgacaaccgttcattcggtggtgctcaggtatcacgtacattctatgcccgcggccaaaccggacagcagttgttgctgggtgcttattctgcattgagccgtgaagttcagcgtggtaacgtgaaattgtacactcgttatgaaatgttggacgttgtgctgattaaggataacgaaggtgtggaacgcgcccgtggtatcatcgctcgtaacttggttacaggtaagatcgaacgttttgctgctcatgcagtagtaatcggtaccggtggttatggtaatacttatttcttgtctaccaacgctatggcgtcaaatggatcggctgctatgcaggtttaccgcaaaggtgcttattttgctaatccttgttttgcacagattcacccgacctgtattcctgtacacggtgacaagcagtctaaactgactttgatgtctgagtcattgcgtaatgacggacgtatctgggttccgaaaaagctggaagatgccaaggcattgcaggcaggaactaagaaaccgactgatatacctgatgcagaccgtgacttctatctggaacgtcgttatccggcattcggtaacttggttcctcgtgacgttgcttcacgtgctgcgaaagaacgttgcgacgcaggtttcggtgtgaacaacacaggtttggctgtattccttgactttaagtacgctatcgatcgtctgggtgaagatgtagttcgtgcccgttacggtaacttgttcgatatgtacgaagaaatcactgacgagaacccatacaagactccgatgatgatcttcccggctatccactatacaatgggtggtatctgggttgactatgaactgatgacttctatcaagggtctgtatgctatcggtgaagctaacttctctgaccacggtgcaaaccgtttgggcgcatctgcattgatgcagggattggctgacggttacttcgtattgccttacactatccagaactatctggcagaccagattcaggttcctcgtttctcaacagacctgcctgagtttgctgctgctgaaaaagctgtaaatgataaaatccagaaactgatgagcatcaagggacatcgttctgtagattctatccataaggaattaggccacatcatgtgggacttcgtaggtatgggacgtaccaaggaatctttgactaaggcattggctcagctgaaagaagtaagaaagacattctggagcgaccttcgtatcccgggtgaagctaatgaattgaatgtagaacttgaaaaagcaattcgtctggcagacttcattgaaatcggtgaattgatggcttacgatgctttgaaccgtgaagaatcttgtggtggtcacttccgcgaagaacaccagacaccggaaggtgaagcacttcgtcacgatgacaagttctcgtatgtagcttgttggaaatacaccggcgaaggaaaagaacctgaattgatcaaagaagatctgaactatgagttcactaaggttcaaactcgtaactataagtcttaattattaattgtatagaaatcatggataaaaatataagtttcacactgaaagtttggcgtcagaaaggtcctaaagacaaaggacattttgataccttccaaatgaaagatattccgggtgatacctcattcctggaaatgatggacatcttgaacgagcagcttatcaatgaaggtaaagaacctatcgtattcgaccacgactgtcgcgaaggtatttgcggtatgtgttctatgtatatcaacggacatcctcacggacctgctacaggtgctactacctgccagatttatatgcgtcgtttcaaagacggtgacaccattactgttgagccttggcgttctgcaggtttcccggttatccgcgacttgatggtagaccgtggcgcatacgacaaaattatgcaggctggtggttacgtgtcaatcaataccggtggtattcctgacgctaacgcaattcctattgcaaaacctattgctgacgaggctatggatgctgctgcatgtatcggttgtggtgcttgtgttgctgcatgtaagaatggttctgccatgttgtttgtttctgcaaaggtcagccagttggcactgttacctcagggtaaagtggaagctgcacgccgtgcgaaagctatgttgagcaagatggatgaactgggctttggtaactgtacaaacactcgtgcttgtgaggcagaatgtccgaagttggtttctatcagcaacatcgctcgtttgaaccgtgaatttattgctgcgaagctgaaagactaatcacggttagttttacttgatatttgagaatgccctgcctttggtggggcattttttttgcctggggcttcttctttttctctcttacgtatgtttctgggagaatcgccaaagaacttcttacagaagttggagaaatgcgagagagattcgaatccatgttcgaagcagatttcggagatggaagcctctgtatagcgcaattggtagaggatactttctttgcgctgcttcatcatccattcataggccggttcgttgaaaatagccttgaaaatacggcggaaggtggtgacgctatagccgcccagttgtgcgaagtcttctacagactttatttgcttgtggtgttttaatataaaatattcaaagctgctggtatacttggacaagctgtgtacaatgggggaaagctcatagtctgtatagtagtgcgccagtagatagtacagttctttacgcttgaattcaagcagttctttacagattttgtctgtattcagataggaggtaaccccttcaaggaaaagctttatttcgggctttattttaagtggctcggagatgagtggcgggggcacgtttttcaatatataggtatagcggtcataacagaaagctttggggtcatcgaatgtgtacagaataccttccgagtctgtcatggccagtatttccacttttgatgcgatagcttgcagtacaaattctccgggattgatgatagtaccggcatattcttcactattgatgagtatttggcctttgagtaagaaaaataagatattagtttcacacttatgtgggggtaagtggaaaccttttttgttatgtgtgtaatggatgctgttctccactgctttagggcattgggtacaatccatcctttcattacagggcagaccagacatatatagatgttagagacgcttgtgttcttttttttgatttgacaaatgtaggtcaaatatggataatttgcaataagtttcaagaaaaagaccgaagaatcctgtttccacttatttgtcttctgccgttatggaaaacgatagcctgtgggcatgagcatagagggctaaatttgtgtggccaaacaaaaagaagttgcaattgttgggaaagtagcagaaagaaagtatctttgtgtgtaccccatggggaggtatatcggctaaaacagcatagattatggaatttgtagtaatcagataagaaattattgccctacggcatgatgaatttcgcggatatacgccttgatggttattattatgtggacaagaccatgtatatcccgttgatagaacgctccaaccgttattttttctttatccgtccgcgtcgtttcggcaaaagtctgacgctgaatatgctgtaacattactatgatgtacgaaccaaggataaattcgacgccctgtttggagacctctacatagggaagtatcctacacgtgaccggaacagctacttggtattgtatctcaatttctccggtatcattggcgaactgcataactatcgtgccggactggacgcacattgccaaacctgtttcgactatttctgtgatatttatgcggaatacctgccgcagggtatcaaagaacagttggacgcaaagaatggggcggtagaacaattagactatctttatcatgagtgtgagcgtgccggtcaggatatttatctttttatcgatgagtatgaccattttaccaatgccatcctttcggatatcgaaagcctgcaccgatatacggaggaaacgcacaaggaaggatatctgcgtgcattcttcaacaagataaagtccggtacctattccagcatcaaacgctgtttcattaccggagtcagccctgtgacgatggatgtggttgtttctaggggtatttttatgattgaggacggctgattgtcaacaggtaaaaatgctccgcaaatgaaatcgcaaatgatagaggggatgatgcggtgtttcattgcggagcggggaattgttgtgtttatctgtatgtttgtcgggggatttgtaaattcattaatttatagtttgttggtttcttataatacaggagttttaggagtttgctcgttatcagtggcattccaatcttcatcatatgttgtgtttacactcattttttctgcaccaaccggtaaagttagtatatagcggatactttgcccattagtccattctcctgttaaagctacttcttttgatccgttaaagaatgttgcattatctttctctgttttatacttgactgtaattttagcatcagtaagagattgtggatatagcattaatgaattattattttgtgtataatcataaatatcatctttggctgttacggtgttatcaaatgtatagctataaccactagcaggtgcacttcctgtgatattccaatttccaccttttccttcagttcctccgaatgtgtacgttgcggcaccaccttttgcaccggtgatagttatgctttcaactgtgtaagtatagttgctttcggctagttttgcagcaaagtttatacgggttaagatgtgttggaatgtaaggtttaatgtattatcacttggcttagttatatctttggaataagctactataatatctttctgatcggccggggtatcaggaagggtatagctgatggtgggataagcgctggaactagcaggtgctgtataggttacatcatcggtgtatccaaaaaattgcatttctgttataggccaataaaaagtaccacttgttgtagcccaattaccttgacctcctttatattctatgccatccatatacgcgttaccccatcctgaagtggcgatatcgctgcttttaattatataggcatgtaatttaaaagacgtgaaactactattacttgtaacagtggcccttgaactctttttgacaatcgtgtttactcctatctcatttttacttttgggagttccattgtcaataccatcaatctcattctgtgagcaacttgtgattgccaatgcagctaaagctacaaataaaatcttcttcatatcctatgtgttttaagttaataattctatgactctttattctatattttaaccgaccggtaattctacattcgtttcatcatcccagtcactaacgttcccatcaaatccaccgccactttcatcaggaggaatctctacatcatccaccacaatcttctcatcatccggaagttcgatctctatctccggctcttgaggtttttcatcgccttcccccggctcgtctttatcttcaggaggttttaccgcttccgttatttctactttcgcttcctgtttggaaccatccacttttactataatcaagttcagaaactgagtgatatcggctcttgcttgcgtcagtttgggatgcccaaagcaggtaaaactcccttttatagccccattccctttactggtttcacaataaataggagcgaaccggcataggctggctcctttgcccaggtggtaacattcagccattccggaaacactgcccaggatggatgcaacatttttcagcccttctgtctttattgaaaaagtgtaagtggttaccacagattttggttttacctctagtgtcggtaattcttcctcttttcctatctctacatcgtccagggttgctacataaaaattatccggtccccataccatgtctttcgtttcctcggcacccagtcccgtacagtttcctgtacatgccattattgtttcgcagctaccttcgtcttttatttgcactacttcggtgtcataattgtaaatcactgccgagtaatgtcccggaggtacttttatttctccgcctttcgccggtaagtaggtatcaatcttccttccttggccgtccttgggatagaagatgatccggactccttccggcagacggtcggttactccttcccaattcagacggatgtttattcctgttacgggataatcgtccagaatctcgcggcggctgcatcccactaaagtcaatagtgaagataaaagtacaagaattgcgtaccttgtctttttcattttcttcctcttttcttggttatcaaccataccaacgaaatttttgctttcgtagggcctataaaggtgtaatttccgctactcatccagactagtgatccctcatagggagtatatttttgatattccgtggtcagatagcctatgcctaggctgaattccaatgccagatgtcgtgacaacaaagtggaatatccataagtgaatcctgccgcaccataatatttaccttggtagccgtttcctttaaactgaaagtcgtagatacctccctcgatatacaatccaaagaaatgtccgttcaatcggttgtgtagttcacggttgcccagccagtaacggctttctattcctcccgaaatcagttggtagcagatttctttactgctgttggaccaccaggggcttttatattccatattcactgaccatctctttcctacaggaatttctatttctatattaggtgccagtgccagatcgtacaataaattatttttcagtgcaagcactgtgttgtcggctgtctggactcttcttgctgccttttctttgggcttttctccccgtttctcttttgtctcttttttcttttctgcctttattactgttttttctgtttctattattacttgtgttctttccttctgtggaagtacttgcatcgtcattggcgtaacggtcgttttcctgtcaatcggtatgaattcggtttcttctatccttgctgcctgttctgcggaggagttttttcctccgttttcttccggataagacaggcagactcttatctctgtccgtctgagttccggtagcactcggtcagaaatatactgataaggtatgccggcgtccaggtgttgcaagaaatcttgcatttttacgggattgtcatggtgataatctatcaatgccaatacatcttcccggtcggggaccagtctgtcgtccagtatcagtttccgtaaggcatccccgtactcttctcctttgcggatacagatttgggcggtattgacctgcggatatttcccacataaaaacacttttacttcctcacttcttttttgtcccagcggtatgccctgttcttttttaccattatataaatccggtgaaaccagaataatggaattaagatggatgctgtgggcaggattggcaagtagagaatccaataccgtcagcgttttaccgtttccttggtaatccttgtctacctgtcgggcattcaggtcaaaatagagcgtcatgtccaacgtggtgtctttggggttttcgtactctattgtccgggcataaatgctatttggcagtaggcacaaaagcacaaatatgctgaatatagtagtgcgtttttccatgaattaccattatgtatgaagcaaatataggtgataaaatctgaaaaaagacttattaaatgttctattttcggacttgaaagggtttgtgaagcgattggatagaatttgcaagttttggcggttggataatgagaggggcaggggacttacttttattttgggtggataacataagggaatactttctttttgttttttactttccagcagacaggaatgaatcattctatgatattgatagaataatgtttcatattccttttttaaccccgcttttcttgtcggattgtaatactgtgtgcgaaaacggttgtatttgtgaaataatactaaatgaaaagcaaaaatgaaccaaatatttggaggtattgagtgtaagttgtacatttgtcatgtgatttttttcatagtattagatttaaggttaacaaaggttggagcaaggcgttgctcctttctttttttagtaccttctgtttctttccattctcctaatcatcagctccttaatgccgttgattttttaaaatattctgtttcttgttttcatccaatggattttatgttatctttgtgtcaatgtaaactaactaacaatctacatgaaaagacacacaaaccttttatgcttgggggctgctgtcgcattgctgaatgcttgcgccccggtggtaaacgctcctgagcctgttcttcctgttcccgagaaaaagcaggtggactggcagaaaatggaaacttatgctttcgtgcatttcggactgaatacttttaatgaccgcgaatggggttatggagattctgaccctgccacgtttaatccggttaaactggactgcgagcaatgggtgaaaacttttgtggcggcagggatgaaaggagttatccttacggcaaaacaccatgacggattttgtctgtggcctacggggctgaccgaatattgtatccgtaacacaccttataaggatggaaaaggagatatcgtacgtgacctttcggaggcttgtaaaaagtatggtataaaattcgctgtctatctctcaccgtgggacaggcatcaggccaattatggaactccggaatatgtggattatttctatcaacagttacacgaattgctgacccattacggtccggtgttcgaaatttggtttgatggagctaatggaggggatggctggtatggcggagccaaagactcccgtaccatagaccggaaaaattattatgattatgcgcgtgcatacgagatgatcgacaaatatcagccgcaggccgttgtcttctcggatggcggacccggatgccgttgggtaggtaacgagaatggctttgccggagctacaaactggtctttcctgcgtgccggagaggtttatccgggatatcctaaatacagggaactgcaatacggtcatgcggacggcaatcagtggacggctgccgagtgtgatgtgtctatccgtccgggctggttttatcatccggaggaagatgacagggtgaagacggtggagcaattgacagatctttattaccgcagtgtggggcacaatgcgactttgttgctcaattttcctgtaaaccgggatgggttgattcatccggtagattcggcgaatgcggttgacttttataagaatgttcagaaacagctggcaaacaatctgttgaaaggtgttcttccgatagtttccaatgaacggggtggaaaatatactgcaaaggcggtgacggatggagaatatgatacatattgggctacggaggatagtgtcacatcggctgtcattgagtttgaatggccggctccgcaaaaggtgaatcgtatgctgttgcaggaatatattccgctggggcagcgtgtacaatcctttgtggtggaatataataaagaaggggagtggctgcctgtgaagctgaatgaagagacaaccacaatcggttataaacgtttgcttcgttttgaaacagtcactacggacaaacttcgtataaattttacggaatcacgtgcttgcttgtgtatcaataatatagaggcttattatgcaggagaaaccccggatgtgtttactgcgaaagcggaagaactgaaaacgtatccgtttacattgccgcaggtagatgaggcggaagccggaaaatgtgcggataaagatgccgccacgacttgctttgtggatggcaatacgcttttgatagatttaggtacggaacagactgtttcttccttccattatttacccgaccagagcgagtataacaaaggactgatagctgcttatgagatttcagtgggcacggaggccaatgctgtgaatcaggtggtgagcagcggggaattctcgaatatcaagaataatccgattctccaatcggtttatttcactccggtaacggctagatatgtattgctgaaagcagtgaggatggtggaaaacgagagtccgatgggctttgccgaattaggagtgcaatgaccatgtatcaatatactcatgtgtccgttcacaatacagctaccgtatgtcaatgagtacatgagtatattgatacatggttacattattaatcggtacactcctcctgccagtgctcgtatcacccctttcatttctaattcaaacagtaatgcactcattcggtttacaggtatgttggtgtctatcaccaatgtgttgatttgtaatccttccggcattttgccgagtcgttttactattcgttcttcttcctcgcttaaatcagggaacaattcccgttgtactgttttctcagttttggggctgctttcccatcccatacccttcactaaatcctcggccgatgtgataagcactgcttggtttttcctgatcagattgttgcagcctatggaatattcatcattgcatcgtcccggaaaggcaaaacagtcccggtgataactttccgccagttcggcggtgatgagggctccccctttggcggcggattcgataacgacggtagcgtcactcatacctgccacaatgcggtttcgtttcacgaaattctgcctgtcgggattggttccgcttgtaaattcggtcagtaaccctccctgttccaacatgctgacggctgtcttccgatgttcggcaggataaatacggtccagtccgtgtgccagcacgcctatggtcttgaaatgattctgcagggcggcgcgatgcgcatggatatcaatgccataagccagcccgctcactatcaagatgtttgggcacaataccgacaagtcggcaaggaaacgggtgcagatatcctgcccataaggggtggcatgacgggttcctactatattaataatatgcagcgtgttcagatcggcatttccccgataaaataaagctagcggagcatcatcacattcacgcaaacggctgggataaccttcatcatttaaggtgaggcagcggatatgatttttctcacagaaagttaattcctgctctgcacgccggaaagcttcggagttattcaacgcagtaatgatcttttcgcttactccggggaccaattgtgacagctctttgcggtgttcgaaaacacgggtggcgcttcccagactgctcaccagtctgaatgcgcctgtcagtcccaatcccggtatccgggtcagggccaggctgcaaatttgttcgtcttgtgtcattcgctcaagtagggggcgaaagtctcgtcaaatagagcgctgtcccctaatctgccgtttaccacgcatactgattctacagtggccttgacagtcactttcatatcgggcagacggaagatgtcctgatagaacacatatttaataccttcttttttcagatagagtttagaaacgaattcgtcaccgctgcgcagcggagttttgaacgccatggtgagccgtgccactaccgggtccactccttcctcgtgcagacgggcgaagctgatacctacggatgtgagaaactcatggcgtgtatgttccagataatgttgatagttggcattgttcacaataccctgcaggtcgcattcataatcgcgtaccttcatcttcagttcataaatatacttttccataaagcaaaggtataagaaaaatgtgttactttgcatctaaactaaaaaaaagaagtgaatgaaactatatgctgcgcctttacaaggttttacggaagctccctggagaaactttcatgaggaagtttttggtggaatagatgcgtattatactccttttgtacgaatagagagaggaggattccgtaacagggatgtacgggacattgctcccgaaaacaatacggtttcccatgtagtgcctcagctcatcgcgtccactcctgtcgagctggaacggttggccgctttgtttacagagaaaggatataaggaagcggattttaatatggggtgtccttttccgctggttgcaagaaagcacaagggctccggcatattgccttatcctgccgaggtagaagctttattgaaagagttgacacattatcctgaactgagtttttcggttaagatgagattgggatgggagagtgcggatgaatggcggccgttgttgcctttgctgaacgctgcccccttgcggcggatcgttctgcatccgcgtatcgggaagcaacagtacaaaggagaggtggacttggctgcgttcaccgctttctatgaggagtgcgcgcatccgttggtatataacggcgatttactgacggtggaggatatccggaaagtggaagagaaatttccctgcctggagggcgtcatgctgggacgcgggttgctggccaatcctgcattggcttgggaatatgtaaacggaacctctttttctcccgataaattgcatgaaaaggtgaaggcgcttcacgcacgccttcttcaatattatgaagcccatttacagggagaggcgcaattgctgagtaaaatgaagccttattgggaatacctgctgcccgatgcggaccggaagataaagaaagcaataaagaaggctacaacgatggataagtatttgacggcggtgaaccagctgtaatgatggaaaaggggcttcaatacatgaaaaccggagtgcttcttcagttcattcagccggtataactgcttgtaaaatagggaagtatcctgataggagaaccttcagtttcctgtcagttacttccagcccatatttttgttcttacctgttagatgagaggtgtgttcgtcatgcctgtattttaagaaatacttatctgtcttttcttggagcatatcttttatcttccttgttatgtatccagttacttcttgataagtttatcatttcactaaagtgatgaaaccttatcactctagtgatgaacttgtaccactttagtgatgaaacttcatcacccaagtgagacgattgattcttcaagacgaaaacacaaacttgtcctgatgaaatcccttttacataaggatgtttacgcttagtcacttttcatcccgaaaggccggaaagcccttgacaaaggcttttcaatgtgctatctttgtggaaacaacaactaaaaaaacaataaaatcatgatgaaagaaatgattcggaaggtgatggaatggtgcaagttatggaacggtgaaattgcaacggcgaaacaggcaggcccttcttcggataaaagggaaaaagaacaggctgcggataatcgggaagtacaagaccgtctggagaactacttgtggaaacactatgagttccgtttcaacgtgttgacggaacagcccgaatattgcgcgaaggggcaagggacggacacaccttataagatagtgactcagcgtaccttgaacaccttgtgcctggaagcgcaccgtcatcgcatcaattgctgggataaagatgtgagccgcctgctccattcggaacgcttggaagattatcaccctttccttacttatatggatgcactgccccaatgggacggagtggaccgtatcactccgctggcgcagcgcatctcgaagaaaactttctggataaacggcttccaccgctggatgctgggaatggccgcccagtggtcaggacgcatggaccgttgcgccaatgcagtggcccctatgttggtgagccgtatgcagggcaagtgtaaatctactttttgtcagttattgatgcccgatgggttgcgggattattacacggacagttttgagttgacgggccagtcgggctgcgaacagaaactggcgcagttcgggctgattaatctggatgagtatgaccgtctttctcctcaaaaactgccgttgctcaagacactgatgcagatgaagaagttggatttccgtaagtctcaccgttcatcctacagtcacctgccccgtatggcctcgtttataggaaccagtaatcataaggacttgctgaccgaccctacgggcagccgccgttatctttgtgccgaggtgaaggagaaaatagactgcacgccgctggagcacaagcaattgtttgcccaattgaaggcggagctggacggcggcgagcgttattggttttcggccgaagaggaagcggaactgcaattgcgcaaccgcgagttctatgccatgcccgtagagcaggaggtgttctaccgttgcttccgtctgcccgaggcaggagaggagttcaaactctattcggcttcggtcattttcaccattttgcagagccgttatcctgccgctatgcgcggcatgacggtggtgcgtttcggcaagatgatgagcgccatgggggcggaacggatgcatacggagaaaggaaatctgtacaaggtggtgctggcggcataattcccgtccatcaggccggctgagagggctgacaggaggctgaaggggcttctgtcagtcttatttgttgtgtgacagtgtgttaaccacgctgaatggtctgaaggtggggtatatgaatgccaaaaaacatactataagaatctttttaaggagccgttttctcaagaatttgtactaagtttgcaaccaaactacataattaaaaaaaactatgattaacagattcgtattaaacgaagtatcttacttcggcccgggtgcgcgtgaagtgcttccacaagagattaaacgtttgggcttgcataaggcatttgttgctacagacaaggatttgattaaattcggtgtggctgataaagtgttgaaagtattggagaatgcaggtattccatacgaaatattcagtgaaatcaaaccgaatcctaccgtaagtaacgtaaaggcaggagttgaagcttttgcaaaatcaggagcggactttattctggctatcggcggcggttcgtctatcgatacttcgaaagcgattggtatcatcactaataatcctgacttcagtgatgtggtgtcactggaaggtgtggctcctacaaagaaaaagtcagtgcctatcattgcactgcccactaccgccggtactgccgccgaggtgactatcaactatgtcatcacggatgaggaaaaccataagaagatggtttgtgtagacccgaacgatattcccgccatcgctattgtggatgcggaactgatgtacactttgcctaaagggctgactgcttctaccggtttggacgcactgacccacgccatcgaagggttgataaccaaaggtgcttgggaaatgagcgatatgtttgagatcaaggcgattgaaatgattgcccgttatctggaaactgctgtcttcgagcctaccaatgcggaagctcgtaacggcatggccgtggcacagtacattgcaggtatggcattctctaatgtaggcttgggcgtggttcacggtatggctcatccgttgggagctatcttcgatattcctcacggtgtggctaatgcactgttgctgcctgtcattatggagttcaatgctccggctgctttgcccaaatatgtagatatcgccaaggcgatgaatgtgtacaaggatggcatgagccaggaagaggctgcgaaggcggctgttgaggcggtgaaggcattgtctgtcaaggtaggtatccctcagcatttgtctgaactgggcattaaggaagaagacttgcctcgtctggccgcttcggctattgccgatgtgtgtacgccgggcaatcctcgtgaagtgacggaagaaattattctggaactttacaagaaggcgttttaagcgtaattcttttgtaataaaagcatagatggtgtgtggatgtgcagggcatatccacacactttttttatctccttgtctttgaaacagcattgtcactttgtagcaatttgttcgtaatccattcagcattcttttgcacttgcaaattaaatttaatgaaaataggtattattgttaaactgctatcaatcatttgaacatgaaaattcttattgagtcaaagagatttttgttgttattatgcttgtcgctattcgttgcgggctatgtttccgcacaggattaccgggcgattgtaaaaggtattgtgactgacgaaaccggagagggggttatcggagccacagtgttggtaaagaacgaatcgaccggtttcagtgccggttctatcaccaacgagacgggagagtacattgtgaagcaactccctttgggttcaccttactctgtcaccgtcagctatgtaggctatggtgatcagaaaaagacaggatatacgctgaaccaaggtgatgtgctccgtctggatttccagttaaaggaggaaagtgtcgtgatggaggctgtacaggtggtggctaattcattgaagaattctatcgccactacgggggccgctacttcggtgacggccaatgatctgaacaaactgccggtgaacgggcgtaactttacttcgctcattgacctgtcaccattgagtacaggttccagcctgtccggacagttggcttcttctactaattataccattgatggcatgagtgccaagggccctacttcgggaggtagtacaaccagtcgcaacggtgtgccatacgccatttcgatggaggctatccgtgagttcaaagtcgtgacgaatgaatatgatgtgactaacggtcgtgccggaggaggtactattagtacggtgaccaaatcgggaaccaaccaattgacaggtagcgctttcacttatctgcgttccgactggttgtccagcaaatatgatatccgcggcaacaagcgctcgaatgatttctctacttaccagtttggagcctcattgggcggtgcattggtgaaagaccgtgcccacttctttatttcttgggatcatcaggctgattcacgtccgttgtatattgccgatattcataatgctgccgatgaaaagcgttataatttgactacggaaaccagagaccgctttctggaaatagcccgcaataaatatggagtgtcggaccatcctcagttcgggtcttttgataaaaaacagaataccgatgcggtatttgctcgtctggactggcagattaatgctacaaacctgttatcgtttactgataattttgtgaatgacaataacaatatgggcttgagcgacaatagtgctatcaatctttatgaagtgtatggtgatgtacattcgttgaacaacagtgctttacttactttacgttctgtactgggaccacgcagtaccaacgaactgaagttgcaacatctttatacattggaaaaatccatgccgggcagtgaattgccggctgataatattccacgtgccattgtgcaacgtgtagaatcggaaatagatggaaacacggcgactactaccattcagctgggtggtcagcgttatagccccgagaatttctataatcacgtacttcagttggtagataattattattataataccaataaggtaaactatacatatggttttgatttgatgtacacgaatctgaattctcgttacggtagtgaggccaacgggcgtttttattttaccggactggataatttcgaggcattgaagccttctcgttatgtacgtgaagtgtatttggatcctgaccaaaataatcagcgtgtacgccaaaatatattgaatgcaggtatctatgcccagttgcagactaaactgttcacaggattcgagctgatggcaggcttacgtttggataatgccacttatttcaataaaggtaatttcagccaactggtgtatgatgaattgggactgcgtacagacaatggactctctactttccagattcagcctcgtgtccagattacttgggactttaatgacaagcacacggatattcttcgtattggcgggggaatctttgcatctgatatcaataactatgccatgattaataatatggtatttgatggtacgaaagtgatgtcggttgatatcaagaatacggaagaagaaccggatatagttcccactcccgattttatagggtatcggaaagatccttccacggctccgggtattgatttgctgaataatcccaactatgcggacaaggctgtacctacgatcaatatgaatagcaaggatgccaaggttcccgtggtttataaggcgaatatatcatacactcacttcttcagtgaccgtttgaaaatgagtgtcagcggatatatgactttgggacgtaacaactatatgtatatagaccggaacatggtggatgatccttattttcgtctttctgcagaagggaaccggggtatttatgtacctgcttctactataggaaaagatggtactcttgattggatggaaggacgtaaaagtaccaaagtagggcgtgtgctcgaattggtcagcgagggaaaagtaaatcagttcgctttcaccgtagatggaacatggcgttactataaagacggagaactttctttcagctatacttggaacgatacaaaagacaatacttcctataatggtaatgtggctaattccgctactctttcccaaatggtggttgacgatccccgtgatttaagcaaaatgacttactccaacaatcagttccgtcataaactggtggtttatggttcggcgcctactttctggggcattaccgtaggtgctcgcttttccggcatcgggggaacacgttattccatgattgtgaatggaaatgtgaacggtgactttgtggatagtaatgacctggcctatgtatatgatccgaatagcagcgctactcctgattatattcgtgaaggtattaattctatattgaacaatccggatgcggaaaagagtgtgaaagattatattcgtaagagttttggtaaagtggccgaacgtaatggaggggtcaatggtttctatggcactttagatcttcgtctggccaagaaattcaagacttacaaaaagcagaatctggaagtgtctgttgatattttcaatgtggccaatatgttgaataaagattggggagccggtcataatctgggaacacagaaaatttatagtatcaagggatttgacaaagatgccaaacaatatacttataatgtaaatgccaacacaggtgtatccagtctgaacggtactccttttcaggttcagataggtttgagatatggattctaatagataatgattaaataagaaataaagatgaaactaagtaaactaatgatggcttttgccatgtgtgctgttactttggccgggactgcccagaccaaagtgattgcccaccgcggatattggaaatgtgaaggttctgcccaaaactctattgcttctttgacaaaggctgcagaggcaaaggtgtatggttcggagttcgacgtacaactgacgaaggacaaggaaatcgtagtcaatcatgacgatagcattcagggaatttgcatttttgatactccttttgctgaattgaaagatttgaaattgagtaacggcgagaagttgtccactttggatgattatctggtagcgggtaagaaattgactggtactcagctgatattggaaatcaagcctcacagaaccgaagaagcggaaaatgaagcggtaagaatcattgtagataaagtgaaaaagatgcgaatggagaaacaggtggaatatatttcattcagcatgaacatttgcgaacagttggtgaaactgactccggattcggaaatagcttatctgaaaagtgatgtggctcctaaagacctgaaggcgaaaggaattaatggtattgattattatatcaaggtattggctgagaaaccagaatggattgctgaagcacatcagttgggtatgaaggtgaatgtgtggacagtcaatgatatggagatggttcagaagatgattgaccagcaggtggattatataactactgattatccattggaaactgaaaagctgattcggaaagatggaggagattcttaataaaaatgtaattcctttcaaatagggatgtaataggaacacaatacatttgcactgtaatttaaaaaaggataatatgaaagctggtttattaaagaaaatctcattggctttgggattggtattatgggtgacaggttctgtatgtgcatcgcctgctgacgaagaaggtgctaacaaggctaataacaatctggtaaaggttcttgttataggacttcacgacaatgtggaatccaactattttcccggcagtatgattactgaggaaactggaataccgactgatagcatagattatacttataatcagattatagcaaaaaatattattgcatccaataagaataagaaataccagttcgttactccggaaaaggcggcggccatcagcagtttgttggataaaatcagactggaaggtgaagaagaggagaggtatgcggatcttagtcaggtggatgataatcggtatgaacagctgataaaggatactgattcggattatgtattatttttgaatcagcattatttgaaatggcaggaaaagcctttgcgtactttgtttcatatcaccagttattctttgtttgataagaatcagaaggaagtaacccgaggtaataactattttaccagcatgaatttggaaagtaaagataagttgagtaaggatagtcggaaaagttcttcaaagatagtttccactattgtaaaaagcttgtcaaagtgatgtcgttattcagaaaattataagaacaggtggggctgaagttcaagacttcagtcccccttttctattttcttttcagatattcgtaccctatccggcaatacaggcattttttcttatcgcaatattctttctttaattgtatcaaggcttggctgtcggcggcattggaagctttcattccgcattgttcccacatgcgggtgatataattgttctccgctttcaattcttccagaaaactgccggcacgtgcacaaagtacaggatttcctttatgcagtccgtaagcatagagaaatgtcactaccgtgttgataatgagtaaatccagtgaggtgttacttagagtcttcggacgggaaggggaagaaccgccaaatgtataatgagtaagccagtattctgaagttcctcctttcagaatatctctgacaccttgtagtgtctccgtttccatgatgcgagagagtagtccgtaggcacgatgataaagacatgctaactgtgcaatccgtatatgcggaaaattagtaggacgtagccggagaaaacgccatagggaagtattcatcgggataagttcgaatttgtgctgtagatagatgtattctttttttagccggagatagtatccgtctccatcagaatattccagaatgccggcttgtccaaagaagatggcttctatctggaaaaggtcgttccgatgtttgtctaccgcccggaagggaagctgatgagcccaggtttcgaaagcgtctccgttcagcccgaaaccgaaattacgtgccagtgtgataaaaaaagcgtcttcccaattgccttgacaacgttttaaccgttcgttcaataaggtcgctttttgctcgaatctttccatctgtaaggcggacatccatgagtgggcggtgaaaggggagagcgaaggaatgatgcggtaacaaggagggtagctggctgtttccaacagttccttgtagttggtgcggaccgcttccgggcagatgagttgtatttgggggattctttctccattgctcctgctgatttccatatctatttcggaggctatatgcagaatgacagagttgtaaccggcatctgcatgatgtccgtgtttgaaccagtctgaagatctttcatgtatctcgatattacctatccaaagtacaccgtccagcttgagcttggcattaaaaaaaccgggaccggcgtcggtattcgccagtcccgtatctataacttccacttgttggccggttgttgttttcagttctttgagagaaaatattttatgtttccatacatagtgtaatagttgttccatgttaatgaggtgtaaatgtttggcaaatgtaatggtttacaacgaaaaacgctatctttgtggctgaaataacattcgtaattatgaaaatagcattaataggatatggaaagatgggcaaggagattgaaaaggttgcagttgcccgcggacatgagattgtgagtattatagatgttgataatcaagatgattttaattcggaagcatttaaatcagcagatgtggctattgagtttactaacccgatggtggcatatgacaactatatgaaaacttttgctgccggtgtcaaattggtatcgggcagtaccggatggatggacaaacatggtgatgaggtgaaagaattatgcacgaaaggtggaaaaaccttgttctggtcgtctaacttcagtctgggggtcgctattttctctgctgtaaataaatacttggcaaaaataatgaataactttcccgcttacgaggtttctatgaccgaaactcatcatattcataaactggatgcgcccagcggaacagccatcacgctggccgaagggattctggaaaatatgaaccgcaagagtaaatgggtgaaagggaccatggtggcaccggatggaaccgtgtcgggaacatcggaatgtgccgagaatgagtttcctgtaaattccatccgtgaaggggaggtgtttggtattcatactatccgctatgactctgaggcggatagcatctcaattacccatgatgccaagaatcggaaggggtttgccttgggagctgttttggcggcggaatatacatccaggcatgaaggattattaggaatgagtgatttatttcagttttaagatatgataaaagcaacacgtacacagtggattaagtttgccgttgttctggcgctttacctgatatttcttgtttggttgagaagctggctgggattggtggttgtaccgtttatcttcgatgcgtatatcacaaagaagattccatggacttggtggagaaagtccaagaaccgtcatgtagtgaccgtcatgggatgggtggatgctattgtattcgcactggtggcagtatactttgtcaacctctatttcttccagaactatgtgattccttcttcctcgctggaaaaatcattgctgacgggtgattatctgtttgtgagcaaaatgagttatgggccccgtgtgccccagactccgctgcacatgccgttggcgcaacacacattgccgttttttaattgtaaatcataccttgagcatccacaatgggattataaacgggtgaaaggtttgggggacgtacagttgaatgatatcgttgtctttaactttccggccggagatacagttgccactggtgtgcctaatgatgatgtttatcgtctgagttatggagcaggcaaggagctggcaaaaccggtggatttggcttccatgtctccggagcagcaacgggtggtctatgattattattatcagttgggacgggagtatctgaaagagaatccacagaatttcggtgagataataagccgtccggtagaccgccgtgagaactatgtgaagcgatgtgtgggtttgcccggacaaacgttggagataaaggatcgtattatttatttggatggtaaagctaataaagagcctgataatgtgcagtatcgttatctggtgaaaaccaagcgtcctattcccgatgacttggctcatgaactgggtatcagcaaggaggatatgatgatgtattatacggatgcttctgtttataatatgcctctgacagaaaaagcgaaagcaggtttgttggcgcgtaaggatattgttgtcagtattgagaatacaccggctgatgatgcgggaggcttatacccgctgaatatgtataagaactggactacggataactacggacctgtatggattcccaaaaagggagagacggtgaaactcacgctagagaatcttcctgtttatgagcgccctattcatgcttacgagggtaatgaactggcagtgaaagatggaaagatttatattaacggcaaggaaaccgatgagtatactttcaagatggattattactggatgatgggagataaccgtcataattcggctgactcccgtttttggggatttgttcccgaagatcatgtggtgggaaaacccatctttatctggttgtcattggataatgaccgtggctggctggatggaaaaatacgttggaaccgattgtttacctttgtagataatattaaataagttgcgcataccctgtattcctgtatggataaaagcaatgcttactgctgtcattctggtactgttggtaaagacatttgctttcacctcctgcaccattccctctaccggtatggagaatagcctttatcaaggggaaagggttctggtgaataagtggagttatgggtttcgtgtgcctttttctatctggcgatggttgggaaaaactgccgggaagggggatattgtgttgttcaacaaccctaatccacggtttcctcaaacgtcggtgggcaaccgggaggtgtttataagccgtgtggtaggaatacccggagatacgttgatgttgaatgatgaactgtgggtgactgacgaacaagtgttgagcccggatagtaaatctttgtatgtctattctcatacggaagaagaaacgatgcaggctgccatgcagcaagtgaacattcagggaaacaggttagtgggatatgccgaggggaagtacatacgtaccttcagtcattatgaatattacctgttaaaacaaaaactggcaggaaaagtggatttgattcctctctatcataaagatataagcaagagccatccctttgtgatcccggaaaaagggaaacctgtcaaggtatatccttggaatgtgaccttgttgtgtaatactattgttcgccatgaaggaagagtggcttctgtcaggggagataccctgtatgtagggggaaaacctgtagaagcctatacatttaataaaaattattactggatggcatccaataatccggtgaatttgtgtgattcacgtttatttggtttggtgcccgatgaccatttgatcggtaaagcttggcgcatttggttttcatccagaaaagggcgcatttttcaacgagtgcaataatggagaatacgatatatttaagttcggcctatctggccccggtggaatattatacaaaactgttcgcctgtgagaaggcctatgtggaacagtatgacaattatgtgaaacagacttatcgcaaccgttgtgtcattgcggcagccgatggtccgctggcgctgactatccctacagaaaaaagcggtacacctaaatgcctgatgaaggatgtccgcatttcggatcatggcaattggcgtcatatacattggaatgctttggtggctgcatatagaaatagtcctttctttgagtactatgctgatgatttccacgtcttttatgaaaagaaatatgccttcttgtgggattataatcaggaaatttgttctttagtatgcgatttgatcgatattcatccccgtatggaaggaacaacggaatattgcatggaatttgttccgggcgaggttgattttcgtgagattattcatccgaagcgtgactggcgtgaagcggatgctgacttttgccctaaaccttactatcaagtttttgatgccaaatacggttttctgccgaatttgagtatcgccgatcttttgtttaatatggggccggagagcctgattgttttgcgagatagtgttaaaggtataaaccataaagaataatatcatgaataatttgtttagtgtaaaagaccaggtggtggtaatcaccggtggaacaggggttttgggaaaggctattgccgcccatttggcagaagaaggtgccaaggttgttatattaggccgtaaggcagaagtaggaaatgccattgtaaacgaaatcaaggccaaaggcggggaagccatgtttcttgtaaccaatgtgttggatgaggctatattggagcagaatctgaaggatattctcgcagcatatggtcgtgtagatgcattgctgaatgcagcaggaggtaatatgccgggtgctacgattgctcctacaggaaatttctttgatttgaaggtcgatgagtttcaaaaagtgcttaatctgaatcttaccggaacagttctgcctacacaggtatttttgaagccgatggtggagcagaagaaaggggctattgtgaatttctcttctatggcggcattccgtccgatgactcgtgtatgtggttatgcggctgcaaaagcgggaatctctaatttcactgcgttcatggccaatgaagtggctacgaaatttggtgaaggcatccgcgtgaatgccattgctccgggattcttcctgaccgaacagaaccgtactttgttgacaaacgaagatggtacatatactcagcgtggtaatgatgtgattcgccagactccgttcaaacgtttcggtaaagcagaggaactgtgtggaaccatccagtatctcatcagcgatgccagcagctttgtaaccggtacagtagccgtagtagatggtggtttcaatgcatttgccatgtaacaagtctttagtttttaattctcaatttttttatttgatatgattttatgtgagcaaacatggcgctggtacggaccgaatgatcccgtatcattgtgggatatcaaacaagccggagcaaccggtattgtcaatgccttacatcatattcccaacggtgaagtatggacagtagaggaaataatgaagcgcaagaaattgattgaagaagcaggattaacttggagtgtcgtagagtccgtgcccgtacacgaacatgttaagacacagacaggagactatctgagatatatcgagaactataaacagagtttgcgcaatctggcagcatgtggtatctatattgtgacttataacttcatgcctgtactggattggacccgtacggacctggcatatacgttgcccgatggttccaaggcattgcgttttgagcgggctgcttttgtagcgttcgatctgttcatcttgaaacgtccgggagccgaaaaggaatactcggccgaagagatagaaaaggcaaaagcgcgtctggcacaaatggatgaggaagaaattcatcgtctgacacgaaatatgattgcaggattgcccggttcggaggaaagttttacattggagcaattccaaaaagaactggaccgttacaaggatattgatgcggacaagctccgcaataatttgattttcttcttgaaagaaatttgtccggtagccgatgaaatgggagtaaagctggttattcatccggatgatccgcctatgtctattctgggcttgccgcgcattatgagtacggaagcggatttcaagctgttggtggaagctgtacctaatccgtcaaacggactttgtctgtgctgtggttcatttggcgtatctgcacagaatgatttgccgggtatcatggaacgttggggagaccgtatcaattttgttcatttgcgcagtacccaacgtgatgctgaagggaacttttatgaggcgaatcatctggagggtgatgtggacatgtatcatgtagttaagaacttgttgaaagtgcagcaacgtcgtggaatatctattcctatgcgtccggatcatggccatcagatgatagatgatttgaacaagaaaacaaatccgggttattcttgtttgggacgtatgcgtggccttgccgagcttcgtggcttagaaaaaggaatagcgatgagtatggaaacaaaataatcttttttttaacatatagaaagaaggcctgaatgtcttccggtgatgaggtatatccggaagtattcaggtcttctttttgtctaagaggtagataatgaggactattctagacaaatatagagattaattagacaaataaagaggtgcaggcaaggggaggaggtttatatttgcaacagatttaatctaattaacccttaaattcttttattatgaataaaaaaacaaaactgctttcaatccttggattggtgacagctatcctgtttttgttctcatcggaggtgttggcccaatccttatctatcagtggtaaggtaattgacaaaaacagtcaggagcctgtaattggggccagtgttttaattgaaggaacctcaaacggtacaataaccgatttggatggtaactttatgctttctaatgttccttccaaaggaaatttagttgtgtcttacattggttatgctacacaaactcttcctattaatgggaggactagtttcagtgttgtattggctgaggataccgaaacgttggatgaagttgttgtaataggttatggcgtacagaaaaaagtgaatcttaccggatctgtgtcttcagtgaaaggagatgcattggaacgtcgtccggtagctgatgccacacagagtttgcaagggatggttccggggttgttggtgagcaactcaaatacgggccgtccgggagctagtggtacgttgactttgcgcggacaaggcaatctggataataatgcgaatccttatattttggttgatggagtggaaatgagtctctcggacgtgaatccgaatgatattgaaagtatttctgtattgaaagatgctgctgcttgtgccatttatggtgcacgtgcggcgtatggtgtcattttggtcactaccaagaaaggtgaggaaggtaaaatgcgtgtaaattaccaaggaaacgtaggttggagtacgccgactgtattgcctgatatggttgattcctatgaatttgctcagtattggaatgccggatgtattaatgcaggttctcctcgtttgtatagtgaggaaaaaatgggtttattacagcaatatattaaagatcccagtagtgtggatccttggttcgagcttcctaaaaattctaatatgaacccggcattcgaaaattcagaattaggagtaggaaatactaattatttcgatttgcattataaggattgggcattcaagcaaaatcataatcttagcttgagtgggggtggcaaaaaagcacaatattatatttctggtggttattattcggaagatggtattctccgttatgccgatatggatttcagccgttataattttgccgctaatatttcttctcagattaccgattggatgaaggtaaaagtaaatacgaagtttatgcattccgatgaggatactccttttggtgacggagggcttagtgaaggcttttatcattcattagcacgtttccgtcctacagttgctcctattgatccgaatgggcattttacagaactgactatgattccttatttgcagagtggtacgtatacaaatactcaacgtgaccgttttagtttaacggcaggtttagatatccaacctgtgaaaaactggtttatcttttttgattatacatataaattgatggatttggaatatgaggcattgaacgtgagcccgttaatttatggggctgacggggtgagtacttcgaaaggtgtgcgtgatgagttgggtgtatcacccgatggcaagtttacccgttattatgcgcatactcgctaccaatctataaatttatattcgaattatctctttactttgggagacaagcataattttaccgtaatggcaggttatcaggaagaaaataatgactatagttatatgaagaactcgattaccggactttattcaacttcaaatcctaatgtaggtatgggaaccggtgataagacggtagtcgatactcgtaatggctgggcaacccgtggctttttcggacgtgtgaattatgattatgacggacgttatcttcttgaattgaatggacgatatgatggatcgtcacgttttgccaaaggtaatcgttggggcttctttccatctgcatctttaggatggaatattacccgggaacagtttatgatgccaatagccgatgtagtttccaacttgaaacttcgtgcttcttacggattactgggtaatcaggcgggtgcggccctttatacttttgccgctactatggatttgaatgataaattgggaaattatatattctctgatggacgccacatctttactaaggcccctgccgtagtcaacccgaatacgacttgggaaaaagtggagagtaagaatataggtttggatttcggtttctttggtaattcgttgaccggttcttttgatgtttttcaacgtgatacgaaggatatgttaggacctacggtggatttcccggatttctttggtgcagacgctcctaaaaccaataatgcccgtatgcgtaaccgtggttgggaattggtgctgagttatcgtggaaaaattggaaaggatattgactatagcataggcggttctctttcggatgctactgctgaagtaactgaatatgaagggactagaacaaatcctaaagataattggtataaaggaaagaaagctggtgaaatttggggatatcgggcggacggactgatccagactcaggcagaggcggatgagtataataatacctatgatttgtcttttataagcggtaaaccttggacgccgggagatgtaaaatatcgtgacctgaatggggataagaaaatcaataatgggcttaataccttggatgatatgggtgatatgacagtaatcggtaataccactcctcgttatcaatataccattaacggttcaattagctggaaaggtgtaaccgtaagcgctatgttccaaggggtcgctaagcgggactgggatcctggtacgggagcttatttttggggaagcggaccttatgcgcaggtgacggtgtttaaagagcatttggattattggagtgagacaaatacaggggcttattatccaaaaccttatattcatacagcaggaggagtggttcctttccgtaataagacaatgacgcttagtgaccgttatctccagagtggtgcttattgtcgtctgaaaaatctgacagtgagttatgatatccctgccgtatggacaaaaaaggtaggtttacagaaagtgcaggtgtttttctctggtgagaatttgttgacttttaccactttgaaaggaatgtttgacccggaagctatctttaccaagaatgattacacggctgaaggtggaaagaactatcctatgaacaaggtgatatcttttggtctagttgttaacttataatttgatgaatattatgaagaaaagaaatatatttttgggtctggttttgatgttaggtcttaccggttgctatgatttggataagatgcctgaaggggtattgtctacgacgattccttttgcaagtacgggggaaatgagaaattatctggatcaattctatcagacaggtaattataaatatgactatgtcagctttggtgatggaatgcgtgcgcaaggttttgatgccggtggtggacaatatattgccggggcagatacacatagtgataatatggcttccagttcggtcagtacccgtttggcaggtgaaacgacattgagtagtgcggtcaaactgcaaaattatacagctatccgtaatttaaattttatgctgtgtaatttagataattgtgtggaaaaaggatctgctgattataatcagtatgtgggtgaggcttattatttccgcgcatggtattattatcagatgtttatcagctatgggcgcctgacgtgggtgaacactccgcttgatcctaatatggaagaaatgaaattgcctcgtgctaaccgcacgattattaccgacagtattttggctgatctggataaagcggtgatgtatctcaatactcagaacaatagtgctaccatgcggattcataaagatgtggcgcgtgctttgaaaagtgaagtggccttgtttgaaggaacttgggaaaaataccataaagcgaaaaatgataagttttttgattctacggtgaccgatgaaaaaattcgcgattattttaatcaggctgttgcagctgcaaaagaagtgatggatcgtggcgtatgggccatttataatactggtaacaaattggatgattatcgtcagatgtttcagactacagatttatcgggtaatccggaagtactttggtataaacagtatgatggagatcagattggtaataatgtaaaccgttacttaaatcaaggaggagggagtgtaggtgttacggcttcattagtggatgattatctgacaattgatggtaaaccgtttgttggtgatgagcggattgaagcgaaaaaggtgttcgggaatgaattgcagccgactttgcgtgatccgcgtttgtcacagactgtttgtatgccggggcagcaattacgtccggatgacaaggctccttattatgttgtaccgccattgattggtacttcatcctataatcagaatatgactggttattctttattaaaacatgtgcaaattgattatacgggcagtctggatgccgagttcaagggagccacaccggctattcagttccgttatgcagatatcctgctgaattatgcagaagctctggctgaactggatggtgtggggaatgcgcagaaaattattgatgccttgcaacctttacgtgaccgtgtaggtatgcctccggtggattttgacagggagtataatcaggaagctgattatggtttccgcaatcttgataagtatattcaggctgtacgtcgtgaacgccgggttgaaaaagcctgtgaaggacgccgtcaggaagatatcatgcgctgggctgctgcggacgaattaatagtgggcaaatggccgaaaggtgcgctctttgtgggaagtaatcttgagaaccatcctgtatatggtgataagttaatttatgatcaagcttcgggaaataatcttttcctgacaggcaagcccggggatccgttgcgctatattatacctacgaatcccgcaggatatgaatcgggttggaaatttaatgtcaaccgtgactatctgttacccattcagacacgtatgttaggagatttgaccggtggtatgtgggaacaaaatcctggatggtaggaattatgttaataaaaaaagatatgagtagagtaacacctgtgttattatattctttgacgggagcagtggtgttgtcatcgctgtcttcctgcaaagaaaagaaatctgaagaggtaaaaaaaccgatgaatgtagtctatatcatgtgtgacgaccattcttatcagacgatcagtgcctatgaccaacgttatatgcagacgcccaatattgaccggatagccagtgagggtgtccgtttcacaaacagctttgtagcaaactctctgagtggtcccagccgtgcctgcatgctgaccggtaaacatagtcatgccaatggatttacggataataccaccacatttgacggtagtcagcagacttttccgaaattgcttcaggctaatggctatcagactgctatgatcggtaaatggcatctggtatctgaacctacaggattcgattattgggacatcctgataggacaaggagattattataatccgaaatttattaaaaatggtgaacgggtacaacgggaaggttatgctaccaatattgtgacagatttagcaataaattggatggacagtatccgggacaagagtaaaccattctgtctttttattcatcataaggctcctcatcgtacctggatgcccgatctttgtgatcttgacttgtatgatgatgtgatttatccgatgcccgaaaacttctatgataaatatgaaggtagaattcctgcatccaagcaggaaatgagtattataaaggatatggatttggtgtatgacctgaaaatggcggataaggagaatgagatccataccacgacaggactggaagaagcgggcagaaatatgtataatgctctgaacccggaacagaaggctgcttgggataagcactatgatcctatcattgccagattcaaaaaggataaactgacgggtaaagccttggcggaatggaaatatcagcaatatatgcatgattatatgcgagttattcattctgtagaccgtaatgtggggcgtgtcttgaaatatctggaagaaaatggattgatggggaatacgatgattgtctatacttccgatcagggcttctatatgggggaacatggttggtttgacaaacgttttatgtatgaagaatctttccgtactcctctgatggtccgtttgccgggtggaaagaaaggtgatattgatgaaatggtacagaatattgattatggccctactatattggaccttgcaggagtgaaggtgccatcggatatgcacggagtttctttcctgcctttactgaaaggagagaaagtttccgattggcgtaagtcattgtattatcatttttatgaatacccggctgaacatgctgtccgccgtcattatggtgtacgtacagatcgttataaattgatgcatttttataatgacatagactgttgggaactatatgatttacaggaagatcgtatggaaatgcataatatctacggacaacccggaacggaaaaattaacaaaagaactgaaagacgaattgttgcgtcttcaagtgcagtatgatgatcctatccggaatatatacaaagactgacaacctaatctaacctaaatttaacatagtatggagtattcccgattcttctatttgcaagaaggtcgggaatcttttttcctataatcagacggactcattcccactatattcttaaatacagtactgaaattacgtgagtgtttgaatcctgtctgttctgccacttcaccaatggataatgtggtcgtgtctaataatttacgtgcatattccagacggcatttaatgatgtattcgctgatgcccatatccatcatccctttagtcttattgtagagtgatgcacggctcattcccatttgttgtgctatgaaattaacgtccatatttacattgctgatattttcattgataatgcggttgaattggatcattagctgttcattgatataattcaggttctcctgtttttgtatagggatatctatggtggcatagtgatttttcatgaagttgtgattatgcatgatattctgtatctgaataaacagcaaatccatatcgaacggtttggtaatataggcttctgcgcccattttgtatccttcttccatactggtgtcatcaacgcaggaggtaagtaagattacgggcatgtagtttaaatcaggcttttgtttaatatagcgacatagttcgaagccgttcatgcgaggcatttttatgtcacttaatacaatttggggacgtcgtgacgtgaggatagggagtgcttccataccatcatgggcttcatatacttcttcaaacagaacttgtagattacaaatcaggtaattacataagtcacgatcatcttccactattaaaatagaatggaatttctctatgctgtcttgttgaggttgtttgcgatctatgtcggctgatagatgtaatgcgtcattcaaataggtttgaggtgtggattgaatgtcggcggcttcctgtctatacggtaaggtgaaaaagaaggtcgctcctttggtttcattattttgtgctccgataatgcctccatgcatttcgaccagttgtttggcatatgacaagccgattcctgaaccttgcaggctatgtttgccttgatagaaacgggtgaataagttggcgatatcctctttttgaagtcctgttccttcgtcctttacagttatccggatgcggttcccgttgccttccagataagtggaaactgtaacggtagagttttcttcgctgaatttataggcatttgtcaagaggttatttataatgatttcgcattggctatggtcgaaatacatactatctatagcagtatcgggagcaaatatcaacgaaatgttacgtaatgaaagttcatccttgaaatcattcaggatattttgcagccattcattaaaaggcgcgggagacatgcgcaggatattcttctccacctccattttgcgcatgttcagaatcatgtcaatgatatttttcatttggcgtgcctgtttgaatgcaccatatagcttgctacggagttcgtatgggatttgcttgctgtttgtgagttgtttcagcggtgtatagattaaggttaaaggagtgcgtagttcatggttgatattgattaacgcttttaccttttccttatagatggtacgttcttgttccttgtattttcgtttcagatgttggtcgtgggctcgtatggcatagataatggaaagaataatgatgactgcacatattaggatgaaccaagactgctgccaccacggaggaagaacggtaaatttcagtaacgtgaattcagaactccaattcccatcgttttgggtacattgaacagttatactgtaattacccggagagatggtgtgcaaaataagatgaggacgggatgtttccgtgtattctttatttaacccttttatgcggaaccgatatatacgcttgtgaaaaacattttctccttctagttgtgtatgtatttgtagagaggagaaattgtaaggaatttccatcgttgattgggaattgaaggggactatagtaccgtttaaagatacttcctgtaattcaagagtgatgggcggaggaatggaggcagattttagggctttgtttattcgtaccaatccttcagaaccacccatgtatatattgccgtcactagccaccaatacaggtttggccaagaaatcattaggtaatactccatccatttcattgtagattacaaaatgatttttttgtggattataagcgtatatgatccctaatgatcccatccatacgattccttcatgatcgatgactaaagaagtgattacgtcgtttccatcgggtaactttaagggctctttacggtttgagggcaggtaaattcgggtaattccgttaggtcctgctatccatagagtccctaaagtgtcaatgcttgcagctaatatttggttgttcttctcataagctatggtttcgtattcattcttttctttattgtactggaatacgttgcttcggtcgtgaaaaaaaggataagtacggtattttcccatgtaaacccaggaatattgcaattgttgattactgggaaaaatgggaatcaattgttgactaccgggtatatatcgataaaaagcattgccatatagttcgatttcgttttgatcattaactcgtatattggtgggtgcactggagcttgccagctttgtttctgcatctttgtccggaagagagaaacgttggtagcttccagtctttttattgaaacgaaaaattccttttgagaaactggacgctagcagttcggtttcggataaaggacaaatagatactatcttttctcccaatgtttgcggatagtgggtaaaatgttccgtttgcgggtcaaagcagttgatgccgcctccatctgtaccaatccagattcgtccgtctttgtcttcccataaacataaggggcatttgtcggataaacctgaggctgggttttgtgcagctttggtataggtggtgataaagcctttttctgctcctaatactccttcccggaccatacctatccacatgtggttgttgctatggcataggcatgttactgagttggctgggaattgtcggttttccttgtttgataagatttgaatatcacgagtgtccggatagatgatattcactccgcctccgtctgttgccagccaaatggctttattccactctgttatatcaagaacgatatcgttgctcaagtttgaattacgggtattataggaggtcagcagttgtccgtcctgattataacattttactccttgcccataaaaggaaacccagtaatgtccggaagaatccttatatagatcgtatgcattggatgattcaccgaatggagaatcggttatttctcctgtatgtttatttaataactttattttccatgcattgtttattatcaagtaatgagtggaatcgaaaggctccatcttgataatacggattcctgttgtttttaaagggattgctttggaatgttttaattctttttcatatacaagtaatgtgtcggttacaggtatcaacagtttgcttccttctgttgctataatggaagtctttaccggtttattatgccgcagaaagatttgcagggagtctttctcatattcataataactgattccttgtgaggtgaccgcccatatccgctcttcattttctccgaaaatatcgttgatgtaatggctgtttttacgtaataagtccggtagattatatttcttgattttttctccattgaaacgatatattccctgagtggttccgacccataatgaaccgtttttgtcatcgtatagggatgttatagaggttggaagcccttctttaatagaaagttgtttaaaatgataataaggacggttgatggaataagtctttatgataaaacaacatagagccaggattacatagacggtttttctcattcagataaggtcttaaaacaaatatttgtacaaatataagaaataggttttgaaattcaaagcggtaaagaggatattgataaccgaatagctgtgatattatatgtaatttgtcattctgaacagatgtagaagataacatagtgttcagaatgacaaaatagattggagaatgagggggatttgtctaacaggttttttgtccttataatgggatttttttcagtttttcattctcaaccattattttatatttctttcctttagttgtcttaaaggtaaaagtccggttaccatatctcagattgcagggttcaccggctttggacaaaataacggcctcttttaatttaccatcctgccaggtaatgtcaatttcaaagttacctttggcacaaagcccctttacagaaccttctttccatgcgtctggcaaggctgggagcaattggatgaatcccatgtgactttgcaacaacatttctgtgataccggcagttccgccaaagttaccgtcaatctggaaaggcggatgggtatcccataagttgtccaaagttccattttttagtaagttgccaaatagtttgtaggcgtggttgccgtcttgcagacgtgcccattgattcagtttccatcccatgctccagccggtagctccgtcaccgcggtgttctaaaacaactttggcggcattggttaattcgggagtagtaattggtgaaagggtgtggcccggatgcagtccgaataaatggttgacgtgacgatgctcgtctttgggatcgtctatgtctgttgaccattccattaactgaccataacgtcctatttgatagggtacaagatgtttcaatacatattgccattgtttacggtctttggaatcgacacccagtgctttgctggcatcaatggcattgagtaatatttcgcggactacagcatgtacaaaagtggctccttggtctacaggtccatgctcgggagaagtggaaggagcagcagtataggttccttccggtttatgccataaatagtctatagcgaagttggcactgctcttgataagatcatagcctacttctttcaggaattttttgtcgcgggtgtaatcatagtattcccaaatgtgagttgccagccagggacctgccatcgggttaaagttccaggacatattttcatcggtcaaaggggaggtgaatccgaaaatgtttccggagatggaggctgtccatccacgtgcgccgaaataggcttgggctgtcttttctcccggtttcaccaaggtacggatgaagtctatcaaaggccatacacattcgttcagattggtggagcaagcaggccagtagttcatctggatgttgatattattatggtaatctacatgccatgggccatctaccccgttggcccacattccttgcaggttggccgggagattgccggggcgtgaactggcaattaataagtatcgcccgaactgataatagatttcttccagccggtagtccggatttcctttgcgatagcgtgctagacgttgataggtggggaggtctgtaacggcaggatattgtaaggtcatgggagcacgagggttcagttgtagttggactcttccaaacagttggatatagtccgttttgtgccgttcgcataactcgttgtaacttttggcggcggcagcgtccatcatggctagggttgtttgttccggatcaggaccgacatacgtcttggggtctttgaagtctggattgaagttgagtttataatcggtatctgcggtcagcagaaaaatgacttcatccgcattgcgaacaatgaatttgccatcagtcgtgttcaggcttcctcctttgtttatggcttgtatgcggagagcaaatttcatttggttgtttttgaggcaaccggtatagagtaaacgattgggaccgtctgctttgatatcacctatggcttcagggttgctgccatagctgaatatcaggttttgcataccgggacggtcggctgtgaacttcagcaccatcacgctgtcggggtaggaaacaaagtatttacgctcgtagttcacttcatctttgcgaaaactgactactgccatggccgagtcaagagacaggatgcgtttataattggtcataccgatctcacttaaaccggtttcgatgtaagcttctcctaatgtagtaaaggagccgaaacgaaaaggtgtttcacggcttggctcataatcggctagtccgttgaaatttttgcaggtaagttcttctgcttttttctggttgccgtctgtaaatgcttggcggatttcgggtaataggtgtgctgactctttatttacgttccaataataagctgctcccttttctgtgtttggtcctccgcgccatagtgtcttttcgtttaaagtgattcgttctgccgctatagatcccataacattgcctcccaaactgccgtttcctatggggagcgagttgttttcccacgctttgtctgttgcaggagaataccaggaagcgcgtccgtccaaattattaggggtatcaaaccagatgctcaatcctttggtgtaatctgtactctgtgcctgtaaggaagctgcgaataggcttcctaaaatgcatagctgaagtttcttcataaattaatgatattagttaaaggtatttctacaaaaatacaattagatttttatttgtgagaaatgtaatgtttgaaatttagggtgatttcctgtttttataggtatatcagggttgaaagataattttcatcgaacatttcattggcgatatcccacaaatgttctgctgtcagcatttctatccgtttgaatacttcttccggaccttcaaatttaccatagtgtaagaaagtttttcccatatccaatgcattgttctcaaaattgtctccggcaacccctatttgtccgatgatttgtttttttgcagcattcagttgtgaggaacttagtttgctgtcacgcagttttttcaattctttatgaactagtccgatgcaacggtctgcatcttccggatcagttccgaaatagatgcagaacactcctgtgtctgtgtatgaggtcagattggcttctacgttatagaccagcccccggcgttcgcgcaaggaaacgtttagccggctgttcataccaggtccgcccaacagattgttaagcaggtaaagtccggttcgtttttcattatatgcattatatccccggctgcctatcattacatgggcttgatgtgtttctttattcagtgtcaatgccttaggaatatagagaaaaggttctgtccgttggcgttcagtaatggaaaaagggatgtcggctgtcactttctctatggtgcgtatcacttttttaaagtctatattgccttgaatgaaaaagatcatattggtagctttgtaaaaacgggaagtgaaattcaaggcatgtttgcttttgaaactacgcaataagtccggttttcccaaaatatttcttcccaaaggatgatcggggaatatcaattcctcaaaatcatcaaaaatcagttctgacggactgtcttcataactttgtatttcatcaataatcacttccacttctttgtcaatctcatgttgtgggaaggtgctgtgaaatacaatatctgccagcagttctgctgcccgtgagaagtgttctaccaggaaagcactgtatatcactgtttcttccttattcgtatatgcatttaaatctccgcctacattttccatgcggttcaggatgtgccatgcatgtcttttttgtgttcctttaaagataaggtgttccacgaaatgggccattccctgttcttgttcgttttcatcacgggttccggcatcgacggcaaagccgcaataggctacattagactgattgggagcgtgaataatgcgcagcccgttaggcaaggtgaaagtattgtatgacattgttttttgcttcaaataagtttcggttggcaaaaatacaacaaaagttattgccgttcttcaaaaaatgcagatatttgtatttactaacagaaaacaagatgatggataaaattgctattttctgttccgcatccgagaatatagagcctgtgttttttgaaaaagcacgtgagttgggcgtttggatgggacaaaacaagaagacgttagtgtatggaggtgctaatatcggattgatggaatgtattgccaaggcagccaaagacaacggttcgatgataatgggagttattccgaccaaattggaagaacgtggacgagccagcgatttggtggatgtgactttccgtacggataatttgagtgatcgtaaagatgtgatgttgaatgagtcggatgtagtgatagctttgccgggaggagtgggtacactggatgaggtttttcatgtaatggcggccgctacgctggactatcatcgtaaaaaagtaattttttataatataaatggcttttggaatggcattatcgactttttggccggattggagaggcagcattttgcccatcatccgttgaacagttattttgctgttgccaatgacttgagagaactaaccgaactacttaaataatattcatgtaacctattatgatgacatctatacacgaattgttgcagaaagaggctcaggctgttttgaatattcctataactgatgcttatgagaaagcagtggaattgattgttgagcaaatacaccgtaaaaaaggaaagctggtgactaccggtatgggtaaggctggacagatagctatgaatatagctacgactttttgctctacaggtattccggcagtgtttttacatcccagtgaagcccaacatggggatttggggattttgcaggagaatgatttgctgcttctgatttctaattcaggaaaaacccgtgaaattgtggaactgacacaacttgcacataatttgaacccgaagttgaaatatattgttattaccggaaatgcggatagtccattggctagagaatctgatatttgcttgtgtacagggcatcctgatgaagtgtgtgctctgggtatgacccccacaacttcaactacggttatgactgtgataggtgatattttggtagtggaaaccatgaaaaagaccggttttaccatcgaagagtatagtaaacgtcatcatggaggatacttaggtgagcgttcacgtgagttaagtaagtaaaaaaaatagaaccaaccggaaggcaaggaacacaaatagaattttattaaaggacttgtgtcatttgtgttccggttttatgtatatattaaattgtaaatataaaaatgagaaaagtaataggtataggtgaaaccattctggatattctttttaaagatagccaacctacggcagcagttcccggtggctcggttttcaatggaattatttcattggggcgtttgggagtcaatgtaacttttatcagtgaaacgggaaatgacaaagtgggcgatatcattctgaagtttatgcgagagaatggagtaagcacagatcatgtgaatgtgtttcctgaaggaaagtcacctgtgtctttagcttttctgaatgaacagaatgatgctgaatatcttttttataaagattatccacggttgaggctggatgtgacaatgcctgaaatacatcgggatgacattgtgatgatcggctcttattatgctgtaacgcctcaattgcgtgataaagtaaaagaactgttggataaagctcgtgaaaaaggggctatcatttattatgacgtgaatttccgcagtactcacaagaacgaggcgataaagctgcttcctgttattcttgagaattttgaatatgctgatattattcgtggctccgttgaggattttgagaatatgtttggtttgacagatgcggataaggtttataaaagtaagattgaattttattgtccgcattttatttgcacgcacggtggaaaaggaattcgcctgtatacaaagaatataaaaaagcattatgaagcggatcctttgcagactgtcagtacagtgggagccggagataattttaacgccggagtagttttcggattgctaaaatatcgtatccgtcgggatgatttggatgaactgtcggaagatgactgggaccatgtgattcgttgtggaaaggatttcagtgccgatgtttgtatgagtttgaataattcgatttcaaaagagtttgctgccggttacaaataaatcgaatagctctcattgttttaaactcttttattatgtatgagaacctttaaattaatagcaggtcttttctttttgctactggtggttgcttgtcaggacaaaaagcggtcttcgcagattaaggtagcggagaatgagtcgaaatatgtggttctggcatatgtcacttcatggggagaaagtacgcccgatccggcatgtttgacccatattaattatgcatttgggcatgttacagataatttcaaaggaatacgtatagataatgaaccacgtttgcaaatggtggtggggctgcgtgaaaaaaaaacgtctttgaaagttttgctgtctgtaggcggatggggaagcagtaggtttagtgagatggcacagacagatagtacacgtatggcgtttgctgcagattgtaaacgggtgatagaccagtttgatttggatggaattgatatagattgggaatatcccggtataggaactgccggtgtatctttttcgccggaggatactgataacttttctttgttgatgaaggatgtacgccatgctatcggtaaagacaaactgctgaccattgctacacaggcaggtgccaaatattacaacttaagggctgtcgaaccttatgtggattatgtcaatatcatgacatacgatatggaggaatctcctaatcaccattcggccttgtaccgttcggaaatggctgaggaatggtcttgcgaggatgcggttgccgcccatgttgccgcaggttttcctgtcggacgcttggtattgggtattccgttctatgggcatgggactaatgaagctccagaattattggattatcgtcatattatcgctttggattctttacagagttgttgggatagtgcggcacaagttccttatatggtaaattcgcaaggacatgtggtcgttaattatgaaaatgcccaatccatcgcattcaagtgtcagttcctgcatcagaaagggatgctgggggctatgtactgggattatgatagcgatgatgaaaagggtacattacgccatgccgtctatcaaggtgtaatgaatccttgactctttcagcttattttttctttatctgcatatttcctgtagagaggataagccgcttgcagtattttgttctttaataaaggaaaatagtcgggataaaccgataaaaaagtttctactgctttgtaggccgcttcgctatcgtgattccttaataaagccccgacccaattgcgggggaaaaagatatctccggtacgttgaacctctgttagttcttctaatgccggacggatatatttcaccgcataatcctttcttgtagaatgattcagatagcttaaggtcgtagctgcccagggctcaatccttctgttttccgcttgcaataaagattggaacaaactgtccaattttaaagtatcggcagtcatcgcacgtgatatgaaatcgaattgacgtagacggtccggattgtggatgcgttggcgctgtgtcttaagtatttcttttccttgttcaggtatacgcaaggccagttcgtaggccaatgtagtgtaatctttttcatttaattgttggactctttcggtttcccataaggaataaaggcactgaatcatagccggacttgctgtttctgtaattagaaggcgtaataactggatgcgacaagaaggaatcggatgagaatagctgagtctataaagctcattttctattttatcacgttctaccgaagatgtctcttgcagaggagaggacaagtaattggttaatgtcgaagctatcaacgggttcttttcacaatgtattccgttgagtaatgcattcatccatgtagtattcggaattctttttgcttgataattttcatgcatcatcattaaaactgcctgtcgggttgtttcattgtctatttcttgccaatgttccagcagccagtggagactgttgttgtcaggaataaacaaaccatatcctcttccgtccgtattgggcaaaatacgggtgggggtaaagggtaacgtaatacggcataagctgtctgtcaggctagcttctatcgttgtgtctcttgttccgcaaagggtgatattgaatttttgaggccagtttaatcctctttgatatgagtcttgctgatgtatggtcagctgtttgccggatacttcgaaattgattatcggcattcctttttggtttacccatacatcgctgaaagcggttagatcttgctctgttttactgtttagaatttgtatcaagtcatcccaagtagcgttggcgtaagcgtaagtttttaaatattcttgaatcccttcccgaaatgcttcttttcccattaattccaccagttttaccatcatgacaggggctttgttataaatgatctgtccataaattaatcctgcattttgaaggttatctagcggttgccggattgcagtggttccgggtgtacggtcttctgacaaggatgcggctgtataagtcttcatccaattcagctggtgattgacttgtgggaataatggttcggtaatcagagctgcaaaataattggcaaatacctctttagtccagacatcatcaaaccagttcatcgttactaaatcgccgaaccacatgtgagcggtttcgtgggcgattaattgggttcggcgaagttcttcatcaggagtgggattttcgcttaggaacatttgcgtgtcattatataaggtggcgcctgtgtgctccatacctccatattggaatcccggcaagataataaaatcgtatttggcaaaagggtaggggacattggtgtattcttccagccagttcagcgaagcggtcacttgtttgaagatggtatctaattgggctacttttttagaatctgtttcgcggtagtatgctgagattttccgattgccttctgtatattcttgatgttctaatttaccggtgacaaaggaaaagagataagtgcttaatggttcagttggggcaaaagttaccgttttgcagttgccttttgtttcttctttagtaatataggtattggaaacagctttccatgctgttggtatatccagtcgtagggaaaatgtggctttcagattcggctgttcgaaacaagggaataaggtacgggcacggtcgggcactaatagcgtatacagaaattcatcatttctgtttagcgactggttgccggcaataaatttgatagtgatattatttttgccttctactatatttttttcaggtaggatgatgtgctcgttatggaattcataacgggcagtttgtccattgacggataccgattttattttttcaggcttttctctgaagtcgagaataatttcttgcggtgcatccagattaaattcaatggcaatctctccatttaccggaactgatttttgttcaggaatggagaaatatagcttatatttcaactctttaatctcctgtttgcgcagtattgccagttcttgcgatacgccctcgtcgtagaaacgaggattgcttgttgtctgttggcaactgcataataataagttgcacatgacaataagatatccgatatatgttttcatcatctaaaatttatcttggttatctgctgcaatttttcggatgccgcgctgtgaagctatgaatgcacctcctaatactcgtttcccctcgtaaaaaacggctgattgtccgggagcgatggcggatgcttcggaaaggaaacggaccaatagttgtttttcatctaatacgagcacttgacatggaataggcttgctgcgatagcggatacgtactgacaagtccttgcattgtagtaaatcctgcatttctgtgatatgatagtcttctaccaacatatattctgctttaagttcctcggcgtcccctaacatgactgtattcttttctgcattgatgcgtagaacgtatgcaggatgccccaaagcgatttccaaccctttccgttgacctattgtataataaggaaagcctttgtgctgacctatcttgactcctttactatttacaaaccatcccggtcctacttgggtgtcaatatccgggcattgcgaacgcagaaagtttcggtaatccccttctataaagcagatttccatactttcacctccacgagccttcgcttcgaatcccttttgtcggagatattcccgtacttcctgcttggtataagttcccaatggaaagagaaaacgttgaagtatctcctgaggaagtttccatagaaaataggattggtcttttgtctgatcatctcccgctacgatatacagttttcccttccgttcttccagtctgcaataatgcccggtagagatatgagcacaattcgtttggtccgcccattcacagagaattcgctctttgaatagcggattgcaaaggacacaaggattgggagttcttccttgcatatactcatcaatgaagtgttttacaataatctgtttgaactctttcctcacatcagctacatggtgttctattcccagccgttctgccaaggcttttgcttccagcacatcatcaggttcatcttgaccgggggtggaaaagcgggaagggacatcccacgttctcatggtaactcctaccacttcatatccttgttcttgcagcatgatgcaagtggcggagctatctattccgccactcattcctaccaagactcttttatctctgttattcattatataaatagttcaggttcacggcgtgccgcacatttttggtgcagcatgggagtgtaaggagtatcaaaaactcgtgcaccattagggcattcttttacacaagcgcagcacttgatgcatttggtaatctctgtttctatttttccttcatcgcttaaagcaatggcatgagtaggacatacttcgatacattcgccacaggcaaaacattcttctgtgcaaactggagcggcaggagtagaggggcctacaaagcgataaggtatatttccttttatgtaaaaatcggataatatttcatctttctccagttttgtcagacagtctttcccaaattgttccgcagtctgtaaatcggtaatatccggacgaccttccgcaatgggcatgttaggacggctataactgtgttcaccaataaaggcaccggcagccagtggagtgaaccctaattgaatagtttcatctctcaattcgactagtgcatcttcgtaatcgcggttaccatatacagtgattaaaatagccggagcattgttgcctcttaatcttcgtagccgttgcaatgctattggggctacccttcctgcatacacaggaactgcaatgatcgtgatagaatctttgatttctatcggactactattctcatctgtagtgagatctatttctattcttttgcccatacctatacttcctccgatggcacgggctattttcgcggacgtatgtgtaggcgaaaaaaatatgatgtgattgcttgtatatgttttcataaacgcaaatatagtgacttttgtccaaaggtaaccaaatatatagataagatgtacaaggatatcgaagattattgtaacatgggtgtaaaatatgattggtaaaatggtattctatacctttggttaatagaagtgatataatagattatacaggttaaattatacttagttgtgaacaataaaaagcccctgtttaggacgattaaaagattttttaaccggaaaataagtgacatgattttatgtgatgattgttaatccttactgacttgagatgttatataaaaggagaatgttagatttttgtttttctttttatagagaataaagtgcgtttcatctgttataaaccttgctttgtcgatgtatttatactattatatataagatatataatgaaagtaattactgactttaataggcttttaaggctttctatagttgtttgtgaggtaaagaatatatagatattcctatttcttaaaatattcctgtattttataaagatttttagtggaaagtcttgcagaatagagtaaaatgggtacttttgtccgatgaaattatggctattatagaaactgactaaaatatggatgctctatttcaaacgcaaagcaatgagctttctactataacgcagaaagaaaagctgtttaaagatgcagaacggcagtggaatacactgtcttccgagaaaggagcgcccggaagaaaagttgattttgagatctataaaagcattttgtataacctagaaatcagaaaagtatatttggattcaaagctctctttagaaaagtttagttcaatagtcggcacgaatacgacctacctgagtaatgcggtgaacaactacttcggatgcaacttcaagcggttgataaattcttacagagtggctcgcgcgaaagagttgctggacggtaaagattgccctgtgagcgagcttttcagccgttgcgggtttgcctccaagagcgtgttctatgtggcattcagaaaagtagttggcatgactcccctgcaatatatatcgcagagccggagtccttttatgattcaacgcaattaagtccttttataacaataaacattttgagtttttaaatttataaatttaaagtttttctattatgaacaaaaaatttttaagtgcaatcctgttcggagccttgatggtttcttcaacaggaacatttgtatcttgtaaagactatgatgatgacatagacaatttgcaggaacaaattaacaaactggcgactaaggaggacatgacttctcagatcgctactttgcaggctgctttaactactgccgcaaaagatgcaagcgatgctcttgctaaggcaactgccgctgaaactgctgcaaaagctgctggtgatgctgccgctgctgcaaaagccgctgcagacaaggctgttgcagatgcaaaggcagaagcgatcaaagctgttcaagcagaaattgcgacattaaaaaaggaagtagaagaatccacagatgctgcattaaaagatatggcagagaaagttgatgctgctactaagaaagtagaagacattgttggtaagattgctgatatggttactagtgtagaactggtggcttcgtattctgctaatcctacaggcgatggactgactttttctactgctattgaaaaagaaaatgtatttagtgaaggtattacaaatgccattaccttcaccaaaggtaatcaaattcaaacaggagataagtttgtagtacgtgtgtctccgactaatgcagtcttgactccagaaatgatttctttgactaatagccaaggacagaatctgaatgaattcttatctgttcagaaagttgagaaatataacgggttattaagccgtgcggcaggaaataatggattatgggaagttacagttgctttaaagaattatgatgaaaaagctttttctgctgtaacagaaaccaaagttggtaatgatactaaagctattctctttgctgtacaggtaaataacaccttgtctaccgctgaaacaagagaagttatttcatcttatgacttaactctggattggcaggcgtatactccacaaaatggattgaacttctttgttaatgaaaagaatgtaaataaaatacacaatcgttattctgcttctgaaaataatactcctgtagaatataaagagttagaatggaaaaatggtgtatctactactgttattggtttagacaaatcaaatacaaacgttaagcaaggtgataatcgtcaaagagaatctgtttatccagctgttcaaggtaaggcattgactatttcattgtcaacaaaagataatgaagtagaagctcctaaaaatattcgtgctatttatgttacattagatagccaaaatgctgtagagtcagctccatctgaaatcaatgcttggaactcttatgaatatacaggattaaataccgttgtggaaggtacttctacagaaattactattaatggagataatatcattgatgatatcattggtttccgtgtgtatgctgtaaactatgatggtacattggttgatcctgatggtaaagctttctatgtgaaattaggtaaagaagctgctacatgggaaactgttaatacggtagtaactccatctgcaaatgatgcaactcttgtagatatgactaaatcagaagcagaagctgttacattaagtaaattatccgcaccttatcaagccacatggactactgataagattgataataaccaacctgtattccatgcatattttgtagactcagaaggacatgagatttatgatacaaactatatgttaaatgctgctttggagagagttgatttcagcaaagttgttaaagtttatactagaccaactggagtagactggaagaaatatgaagacggtaaagaatataatggtacattgactatcaagaatgaggatggatttgtattagcaacgttaaatgttactatgactaaagaaattccaaccactttaccacaaggcttctccattaaagacaaacaagtaattgacggcatctataattgttatatgattgctgataattgggctgcaagtcaagcttctaagggtgcaatgcctattgaaaacttgattaatttcgggttgggccaagctgaccaatacaatgtaacatttgcttcttctgtaaaagatggagataaagataaagatgtaacagtaaacggtgctcaaagcattgaagttgtaaaatcttatattgataataagacagagcatgcaactaaggttgtttacaattatggtaagatttcttcaaagaaaaatagtgctggtgaatatgaaaatgttatagtagaagctgcaacatttaatacagtttactgctgcttctataaaccggaagtacatacttgggcatgggctactcgcgaaaatttaggattagctgctaatgctaacttgccttattcaacaaatttgacttatggcaataatgcagccgctcctaccactgcacatatctggggtactaatgctatagataaattgtttagtacagcacttaaagatgcttatggatcaagtctgagcattgaaagtgctaagttgacttctgatgcaactggtaaagaagactacttcaaagttgatttcactaaggcaaatgtctttgaagctataaaaacagatattggctctaatccgaaacaagatgttccttctacattgactattaattgtaaggactcctatggacatgatgtaactattacattgaagatggttgttaaacctcgtaaatagttttggatttgtatttattagaaggtttttacattctgtaaaatctgtatagaaaaaagaggttgtgtccaacaggcacaacctctttatttttatagtttagaaataatcaaattaatccttctttaccgtaatcttaacgggaacttcttgatcaagatcataaccccaagcatcagttacggtgactttgatgttagtcttaacttcagtatcaatgctagttccagaaaccttggttatagtaagagaaccgttcttagctgctacgtaatcatccttacccggagtaccagttgcagctttatactcagtaccatttaccggaactgtgaacaattcttcgttaccagacttaaatgttacagctttgatttctttacgcttccaagtaccattgtctgtatcagagaagatactgtaaaccacttctgtattgtaagtatgagccttgatatgattgtcgttaattgtatatccatccaaagaagcagaaggaataacgacctcattacctacagcgtatactttaccctccaaaatcggactcataactttcaatgtgaagctataagtttcatcgccataagaccagtatcctaagtagttgacattactgattactatagtcagattctgtttgtaacccttctgagtaccgttatcatttaaatcctttgtaccatcggtattcaaatcatctttcaatctaatagtccatgtagtaatatcagttactttcgctgaagtagaagtcacattgcttaattctgccaagccataagatgtatagtcaccaacaatcttggttgcattgtcaaggttagcatcaaatgtagaagtaccaacagttgttgccaggttcttgaatgcattcttaattgtatagatagcagctttgtttgcagcagtagaaccaccttcattagctgcttcatccatataagcactagcgatatcattaacccaaataccatcctgatgaacgaacatatccttcaaagcaggtaatgtcagagtcaacttaatagtagcatcagctaatttggcatcagcacctgcataaactacttcaatagtatacggagtattgactttgaaattagaagcagctttttcattatcaatagcgaatttcacagtagtagcagcagcaatcttgtctgttactgctttaccatccttatcaaggaaagaaggagtgatacccttagcgaccagggtagcagctttagcaccatttaacccggcaacaacatcgcccttagcatcctttacagtgaatgttgtattatttaccaatgcatttctgttgaatacagctaggttttcagcactcatcttatctgtcatgctcttcaaatcaatagagaagaagttctttgtagcatctgcaacaatcttatgagttctttcataaacaactccgtcaactaaagacttggtaaccttcacataaatatcctttgacgctacgttaccattaacattcaagtatctaacgacaactttaaatacagcctttgtatcgctatccggcatctgagttgccttgaaagtcatagcagcattgtcatgatcgatagcaaacaatacatcatcgtcattagaatattcaatatatgcatcatatacggcatttgctgcatcaaaagtaatcttattatcaacattcaagtcgatttcaacaggagttgattcggtgcctaatacagtactaccatttaatttaactgtagcatcatccattttagtaccatcatgggtaactccaatgccaaattggctggtgaaagttcctgcctcattttgtaaagcaagtttttgcgtattgatgtccgaaccatccactttccaagcatcagctttgtaatcagctttcttgactactgtaggagccaaagagaaagtatataatcctgctttctgagcagctctggccaatactttattataagctacagcactgttcaatgcaagccaatcctgagaatttcccttgctatttaccaaaataaatgactggccggtaaagtcaactgatgacggagccatacgaaccaataaagtcttttgatctttagctgttgcaacgatatagtcatcttttgcaattgtacctttaggaccttcccattttgcaataactttatttgctgaataattcaatacgacagcatcagagcttatcttgttatcatcaccaagcaaaccaacgatttcaaattcgctcatcaaagaagctgctgttggaacttttacttcttgtttgttgccgttagcatcaatcactgtcaatgtccatccgtccgcctcgctaccagcaacggctaagccagatacgggaatattgctattttcgtattcgcctttatcatttaaagtataccagaatccaccctcgatttttacaggagctttttctgcatctttagtcgggtaaatgccagtaggctcattgtcaattaacatctggccgtctttgtcaaaagtaattttctgagcatctttgcccggctcaccgtctttcacatccaaagttactgtgacaggacttcctttagaaaaagtaaacgtaatacccttgccatcagcagtttttgccacaccagttacatagtctccgttgtcaactgttgtctgtaaagctgcgatctgagacttcagctccgtcaactccttgtcgatacgatcgatgtcatcatcatagtctttacaagatacaaacgttcctgttgaagaaaccatcaaggctccgaacaggattgcacttaaaaattttttgttcataatagaaaaactttaaatttataaatttaaaaactcaaaatgtttattgttataaaaggacttaattgcgttgaatcataaaaggactccggctctgcgatatatattgcaggggagtcatgccaactacttttttgaacgccacatagaacacgctcttggaagcgaacccacaacggctgaaaagctcgctcaccgggcaatctttaccgtccagcagctccttggcgcgagccaccctgtaggaatttatcaaccgcttgaagttgcatccgaagtagttgttcaccgcattactcaggtaggtcgtattcgtgccggaaacgaaagaatatgtataatgctgataaacaataatatagcaaattcagtagaagaaatatatcttattgcaaaatagatagattctaaatacttttcaaagtatcctttaaaggacagaatgccaatatatatggacagaaacaggcgattatccattaataagaaacggaaaaacttgtcataagcagaaaaaacaaatcctttatttgctttgtttgtcatttactaatatctttgttttatcattcattctagaaccgcaacaaaatatgaaataccctattggaatacaaagttttgaccaaatccgtgaagatggctatgtatatgtggataagaccggtttgatttacaacttggtaacacaaggcaagacttatttcttgagccgtccacgccgttttggcaaaagcctgctggtaagtacccttgcctgttatttccagggacgcaaagatttgtttgccggactggaaatcgacggattggaaaaggactggtatgagtatcctatcttccgtatagactttaatggaggactgtatacacaacccggaattctggaggctactattgaaggctatttagggaactgggaagatatttatggcaagaatcccaattatacaaccataggaacccgtttcattgaaatacttcgccgggcttatgaacagacagggcggcgtgcggtggttctgattgatgaatatgacaaacctattttggatgtattagatacggaagcttgtttttatgatgattatggaaagcaagttctgttggagaaccataaccgggaaatattgaaatccttttattctacctttaaaggagccgatcaatacttgagattcgtattgttgaccggagtaacaaagttttcccaagtaagtgttttcagtggatttaaccagcctaaggatatcagtatggatgaacggtacgaagccttgtgcggtatcacccagaatgagctggaagcatttttcgaagaacccaccatacagttggctgctaaatatcagtacacagtgaaagaaatgaaggaacttctcagacggcaatatgacggatatcattttggagagaggatgaccgacatttacaatccgttcagcattcttaatgcttttgacagtatggcaattcgtgattactggttctctacaggtactcccacctatttggttcgtctgctgcaacacagccgcgagcagataaacgaacttgccggacgttattatgttccctctttgtttgtggattataaggctgatgtggaacagcctctacccatgatttatcagagcggatatctcactattaaagaatataatagacgtatgggaacttatctgctcgattttcccaataatgaggtgcgtaaagggttcttgtccgtattggcagcacattatttgaaacccggaggtggagaggtcaacagttggattatcgatgctgtcacttgccttgagcaagggaacacctccgctttttgtgattctctgaccgcctttcttgcaagcatcccgtatgactctcacacttccttgaaggaattggatatgactgagaaacatttccaatacactttttatctgattctccgtttgataggagtttattgccgtgcaatccattgtgagaatcgccagagcttcggacgagtggactgcatattggaaatggacgaatatgtttacattttcgaattcaagatggacggaacagcagaggaggctttacagcaaatagcagagaaaggctatgcccgatcttatttgaccgataaccgtaaaatagtctgtatcggggtgaatttttcttcccttacacgtactgtagaagaatggaaggagataatttacaggtaagatttagtcatagtcagcctaaagcgttaaacaaaagattgccttccactattttttatgggaatataccggtaagaatgttcatgctgttgccggcataacacatttaattttcatctttttatcattttatttttctttttgctaagaatgaattattttcgcagccgaacacaagtttaatttcttaccgacaataagcagacatgctttaatcctcgaccaattcaacttgtcctcattttaattttaacggataagctgatgttttgtccctcactattataaaataaaagaatgaaaagatcactgtatgtatcgctattgacgatcatgtacttctctgcctgccaaggtagtgaggaattagagcaatcacaagaaaaagagtacacggtatccattatggcaagaatcggaaaaacagtttccggagcacgctacttgcaagatcatgaaaatgccatcgctagttttagtaaaaccgatgatataggtgtttttatggacaatgacagtgccgtccgctggatattcgatggaacttcctggactacagaaaagagtgtcttttggaaagataaaaaccaggaacatactttttacgcatattatccccactccggttccaaagccgaaagtaaggaaaatataaaaatgccttctctcgacagccagaacgggacttgggaaaatattgaccaatatgactttctagtaacatccaggaagctttcctacgataccgaccttggcaatgtggccttttcgggcgattattcatttaagcacgttttgtcactattaaagataaacataaagggtgaaggagatatggcacaggccgttattgacaaaatcagacttgaaggaaatgggttgatgactcaaggatactactcctttgaaacgaacagcatcaccatcagcgaaactcccaaggaaaccttccagattactccgtcacacaccatgaacaatcaggatgcttctttttattttatcctgaacgggggcgagaatgacggaaacattgatccgaaagccgtgaaaaaccattctgttaatctcaccattgaatatacccgtaacaacaaatattacataacacgacgagacgacctgtctccgggcttattgtccggatgtattcataaatacaatattgtagtaaaagacggaaatgtaattataacgggaggaagtatttcgggttggactccgggaaatgaagaagaggatatagttataaatggagaagaaataaacccacaaacaaataatatgttatgaattatagattaaccgaattaaaggtgcttctgtttctattgctgctgcctgctgtttcttgccaacgcccgatgtacgatgaagaagacgatgaagacggagtctcgcaaacaaatcttcctctaaagatatctgccagatctagcggagagtccctaattaattatccggcctatatctatgcgtttgcagaagacggcagctgttctgcaaatctgaaaatgacagataacgctcagattgaaatgaagttacctcctgcccgatatactattgttgcaatagccggtttgggagaggaatatatcgttccgaaagatcctagccttgatgatgtaattgttatgaaagaaaataacagaagctcacgcgcgctaatgatgggcacttcaactgtgacaattgccaataagaaaaatatatctgtttctgtaaccctctattatgctgtatctttagtcaatatcagtttggaagatataccggcaaacgttaaaaaggtgagtttgcagatttcgcctttatattcttccctgtcgtttacaagggagtattccggcaaagacaagagtacggaaattatttgtgagtctgagccgggtggaatctggagtgcaaagcctttttatatttttccggggagcggctctcagactgttttttccataaccttggaagataatagtcagacaaagacgtttggatacactttcaaaggaaagccggaagcgaacgtgccattgaatatcgggggtagctattcgggtgatgtcacggtagggggcagtttgatatcaggtgaatggaaggctccggtagacatcaaattcaattttggcggtgctgatgaaggtaatggcggtagtgagccgcctcccattaatccggatctttccgggctacccgaaattggcggtatctggaacggcggtattgtagctggcatagagaatgcaagttccacaggggcggatattttgttgatgagtctggatgagtggagtggattcgcttccgatgtgcggaatatcatacaggaggaggaagcagacggatggcatcttccgactgaagaggaggcaaaagtattgcataagacgttcagcggatcatcactggatgaactgaatgaaaccatagagggattaagaaacggagacccgttattggatattgagaaacggtatgtatatgatcataacggaagcatatatgcattcggatttaaaacctcatccaaatttttacaggcggggagtacggtgaaatacaaaatacgtttggtatgcagcgctcattatgatgccggatgacccattcatatactagaaaagggcattcacacttcttgacaatatatgcttgagagtgtgaatgcgtctaatcgacttccataccgggaatctcatttccatagataaattctcaattaattgaaagttaacattctaccacccggtatacatttcctttggtggtatgtacccgttcgcccagctggggcaggatacggctcaggctgtaagcggtcatccctctcatgatcgaaggatgggctgccttcatacgttcaaacagctgggtggcggagaggctaagcacttcctgcggattgtcctcttctgtagcaaagcgaaagcaaaggcggaacacctcttcttcgggtacatgcttgtagaatagggcattatgttgctgtatagtctgttcctcttctttattgaaccagcttcgttcaccggatagaagttctgttttaagctgggcgtacaattgcttatgctctacggacgtggtgcagtctatggcatgtttcagactgacgcaaagaaagcggcgtgagccggtgcggtctaccagcaaatcctcccggttgctggtgccgatgaacgaggcaatacggggaagcgatgaagcgctgtgtttgtaagccttgcggatattcagtgcggaggcttgcatcaagttcttcagcaaaggcattttggatgcacctagtttgtcgaattcatccaagttgattaatccgtaggcggccagcttggcttcggcggatgccggggaacttaggtcataactttccgtgtagtaggatttcagcgtatcgggcatcagcagacggcagaacgtacttttccccaatccctggcggctgctcaccagcaggggagccacactgttggcgcggttgttatccggattgagctgcatccattgagcggagagtcccagcatccaacggtggaaaccgttcacccatatcgggtcgtcggacaccctgcgtgccaacgcggacacccggtccgtgccgtcccattcgggaagctgctcaaaataggcagtaaagggatggtattcactgatgcggcgtgagcgcacaaagcgttgaatgtccctgtcccaacagtctatgcccgtttcaatagcctccagacttagtgagttcatccatcgttcgtccaccttggtgtaacgcagatgagtatcgggaatgttgttttctacacttgccacttcagtttcttcagtaagcacattgaaccggaagcggtagcgggaggtgaggaaagcggtcacttcctgcatcagggtatgtgatttcgctttcttgccagtatcttctggggaggttggtcctgcttttttctgaacatcttttttcaagtgagcggaatccttctctgttttttcagttgagactatcggatgtatccgagaatcgtccatactccccggcaggttatccttaccgttttcagtgagaagaacctgtgagtcggccatctctcttactccttcttcgtccgacacgatgtagtggtaactgcccgtggaagcattcccgtcggtgcgcggagtccagttcaatgccagaactacttggccctcgcggatatccagcgccagacgcacgccgggtatagtccggcaaagcggcatcagcccgttgagagcggatacgagatcacgacgcggtgttccgtcaataggaacagggcttgacaggaatttgcttccgaagaagactgttttgagagtagcgaatacattcatgagttacttttttaagtttggcaaactacaaatatacaacataaaaaggcgtttgtcaagagggggcggaaatatggcagatcttggtgcaaagttcaatgaaacttggtacaagatatggtgaaacttgatacaatatatacgtacaggcctacacattactaacgttacggttcatacgttactaatgttgaggcttgcacgttactaatgtttattgttgaataagccgacatgtttttaaaatataccttcaggttttaaatatacatcttcaggtttttaaaaaacaacaatacgtttaaaaaaaacgtcagcatgttccgtgtacaaagttgccgtgttctgcgtacaggcctatcgtgttccgtgtgccagccaagcttgttcatcgcattacttccttgttaagccgatatgcttccttctccattcatcctgtcattttatttaagacatacagacgatcagctggttaaggttgaaattacttcctctcactcccgtttcagccgtatgtttgtacccttttacggaaaggtgtgaaagaacggtaggaaaggagaatgaaaaggcaatgacaggatgtcccttcatagccggaacgcctatcggcagggtgtttcgacggtagatgaaaggaagaaagaaacaaccggcttttatcgctgagccattcaagattaagagaatctcagaatcccgacatgctaataaacagataatcatcaatgttttgagcctgatttatgatcggtatgaaagatttatatttttcagactatgtaacaataatcctcccagcctttccattctcaggatacattgttgcttcatacagatgaaaatgagattccggatagcttcttcttccagtttatcaggtccgataattcttttcagtttttttttcagataaattatatcacaattcttgctgctccaaataaacaaaagtatatttgcaaaaataaccatggttattataaccgttattatttttataaacatctaaatgttaacaatatatgaatttctttggcagagaaaaagaattagaaattctcagaagagaggaagaattgtccgcatcatcggcacggttcaccatagtcatgggcagacgccgcatcggcaaaaccagtctgataagacggaattttcaaggtaggcaatgcctttatatattggcgaaaaacgaggcggaagctaccttctgcagttctatacaaagacagatacagagggaacttggtatatccgtttatggctcggtacgttctatgcgtgatatttttgatattcttttttcgtatgccactcagaaccagctgaatctagtgatagatgaagtacaggagttcttttatgtacgcaagagtatttttgccgacatgcaagaattatgggataaatacaagtcggatatgaaaataaacttcattacttgcggctccatttattcactgatgaaagaactgtttgaggataaaaaatcggccatgtatggacggatgaccaagcgtctggacttgcagccgttcagcatagcaacacagaaacagattctaaggcattatcatcctgcttatactccggcggatttactttgtctttatatgctgaccggtggggtagcaaaatatatagaaacattgatggacgaaggtgctttcaagaaagaacgaatgcttacttgctttaccaatgaatacatgccttttcttacagaagggaatgatttgatcaatatggaatttagaaaagagggagccgtttattattctatcttgagcctgatagctgacgggaaaaatacatccggtgagatcgactcagttttaggtatcaccacaagtgcctatctgcgcaaccttgaaatcaattatacccttttgaagaaaatgcgtcccatctttgcgtctgaacggagcaagggagtcaagtacaagctgaatgacaattttctgcagttctggttccgctttatctatcctaaccttgatttggtggagaatcaccggtcggatttattattggatattgtaaagaaaggatatgatgtttattccggtttggtattggagcgatatttccaacaaaagttatgggaagaggagcgtttcacgattataggaaactggtgggattcaaaaggagaaaatgaaattgatatcgtagctgtaaaccgtattgaccgtacagcccggatagcagaggtaaagattaaccggaataaaatatctatgccggtcttgaaagaaaaatcccaaaaacttataggcgagttaaaaagatatcagatagaatatacaggctactcattggaggatatgtaagatacggaataaaggcattcacacccctattttatggtacgcctatcagctgggagatacacaatggattacaacatgacacgtttggaattgtatatcagttccatcgcttttttcaggaaccttccggaataagaaatcttaccctggggaagcttcatgccgctttccctttataacgacaggtacagttcaccaatgggcatttgttactgaaattcctcattgaccggctttttaataacccaaacctaattgccacaagggtatgacattcatttatccggcttcttcaatgtacaggctataatcttcaatattattacggctggcgctcaatatggcggcaatttcagattccaaagtatggttgataatctgttgcaatcgcacatcgaaatcatcttccaaaacgaaaggataataacctctctttaaataattagtaaaatataccaaggggcggaaatctttcggcaattcgactttgtgttgcaggatatctgataaagaataagtattgatggaaatacggtgaaacagttggagatatccctgaaagagaggctctgcatttgatacataacggtacggcggcttaaatcggccccccttttatctgcacactcttgctgtacatatatttgcttattttgcactattaaggtgcattttgaaataatagaaaacctttcctatcttcaataaatgtaattattcgtgcaaactgtcctccgttgataatatataaaaatttatttagaccttctatagataaccaatagacagagtagttttttatttggtagttacattgttgatttatagtgatataagtattcttttgttttcggcacgaatacgacctacctgagtaatgcggtgaacaactacttcggatgcaacttcaagcggttaataaattcctacagggtggttcgcgcgaaggagttgctggacggtaaagattgccctgtgagcgagcttttcagccgttgcgggtttgcctccaagagcgtgttctatgtggcattcagaaaagtagttggcatgactcccctgcaatatatatcgcagagtcggagtccttttatgattcaacgcaattaagtccttttataacaataaacattttgagtttttaaatttataaatttaaagtttttctattatgaacaaaaaatttttaagtgcaatcctgttcggagccttgatggtttcttcaacaggaacgtttgtatcttgtaaagactatgatgacgacatcgatcgtatcgacaaggagttgaccgatttgaagtcacagattgcagctttacaaagcaaaatcgatgctggtaagtacatcaccagcgtagataagacagacaagggtcttacctttactttaaatgatggctccagctatgaggttaccaatggagtcgatggcgaaaaaggagagaaaggtgacggcaataagttgactattgataaggatggtcaatggctgattgatgatgaacccacaggatggtattgtgccaaaaaaggagaaactgctactgtaattgttcctgaagtgggtgcagacggctattggtattttgtcaacaaagagacaggcaaacttgaaaaatctacttataaagctgctcctgttagtgctgtcgaagcggatggtatctgtacattgactgttgttaatccggatggaactaccactgtagttaaattgcctactactgctgcttccattacagaaatcgaatttgttggttatacagatgcaaatggtgatttccatgcattctctgctactggtcaaaatatggccgacaataaatatattatgtcatactctcctttctatgcaacacaggattactcttggaagtggacagatgctgatgaaactcagaaagtagaagggaagattgctgctaaaactgctattgtagctttagaaggaagatctttggtggtgcgtgtagctcctttgtctgctgatgcttctaagctttctttcagcttggttaattctaagttggcagaagctcctattacattgggtgaagtgaaggcttatgaaggtttggttactagagcggaatcctccaatggtttgtggactattgctttagatagcaaagaattgtcaggtttggacgatgcaacagcattggataagaactttgtttcaaataatgccagcattgcatttgctttgagaacaagtaactttatttcaaactataacttgacctttaagaaagatcaacttgcatctgttgtatcttctttaaatgataaggaattggaaaatgacgaaaatggaagtgcagaagcagcttttgtaacagttgcacaaggtgccacaaacactttcacttttgataatccgacatctgtttacaagagtcaaattattgtagatgaattcaacaaacaaaactggggtgttaaaatcgaaggtaacacattcaaagtaacagaatactatgataaggctactattcctgcattccctgtttatttctattatgaagtattgaaacaagatcctgctaacacttctaagactattgctgagtctgtaaagaaaatcgtttatgttcgtcttgaaagaagtatttctgacggtgttgttttggatactaagaatcatatcatcaatgcagttgcaaccaacgataatttctctgctgcaatgaagccgttctttgatagtatgagtgcggaagaactgactaactggaaggaattcgttaagaatgcagatgtgaaggtatatcaagtaggaactaatgctgatggtagtgataaggatataacagcccaaattggttctatggttaaattctatgaatctaacggtactacggaagtcacttctgctgataaatatagtaagattgctactatcaaagttgatttgaacaacaactggcctactgacttggcatttgacaagaactactatatagaagttaaattctacgatgcagcagctgtgaatggtgaggtaaaaggtgatgtacttaattctgttaagttgccattcactgtaaatattccttctatcaacgatatttttgttcaacagacaggtgtgtttgtaaatggggtagctaatgcttacatggatgcaacagctggtaatgcagatcttgctttgaattatgctcttaagagtgcatttaatagcttgaaggctaagatgggtacttctacattccaattggcaatggatgataaagatgctaataagattggtggcaagaaacattcagctttggctaagtttgtgcttgctgctactggagatcaacaagaaagcgatcttataacagaagtttcatctactaatattgatagagtaaatattcagttgattgatgctgttaaaaacggtacaccgcaaaatggttataaacaagaattaattgtcaatgtaaaaaatgctaagttcgtagataaatacgcttatggtacttcagatgatgttgactatacatttaagattaagataatgagtccattgtacgaaggtgtagttaaagctgttggtggcaaagtagaagttcctgcaactagtgctagtggttatgaagtaaacgattctcatgttaaaggttacacttataacgaccaagtttatagcatcttctgcgatgtagcaggtacatatgactggacacgtaaagagttgaaggacgtagagttcacatctttggatgaaaatatctttacttgtgaagctaagggtaaaatagctggtgcggctgataacaagggtaactttaaagccggttatgttgtagtgaccccgaagaatttggcagaaactgcatctgctaagatgaaagttacagttgttgatgcttggggcttgaaaaagtcttctgatattgatgttactgtaaaagtaggtaagtaagatacaacttaataaataaaaagagagcggtcattactgatcgctctctttttagtaataatttatttttgtcaattctacttctttaagctaataaaatactgtatattataataactaaagtatattctattgatatgataaaagtagtaaatatttatatatcttatctcttaaaaaactgataaaagatttctccccaaatgtcattccatagaaagttatcctacatattctctaatgtgtattagtatctttataccattgtagttttgtatattcctcatttaagtcattaagttctctctgcatgataaaagtggtcatacctgaaaatgctgtgatagggaatgttccttcttccgtagcataaaaaggagtatttcttttgtaaaccacacattggctgatacactcttgaagtgcattgtatgtattttcatctgataatgattgataacattgagcgaaatcaaaaaaatagaatggggcttttaaaactccatcataattttgaaggttaccgaccgggaggaaagaaccagatatttctgtattgatctgtcgtatcaaattcgctaaatttgataatccggcagtttttattatgctaatggtagcagaacgtttatcgccttccatcaaattccaataatgaaaataattttctgcgaatctttgcaaatcagcagcttcttcaagcagacaggaaatactgccggcatagataggagtgaatcccggagatactactggggcagaggaagccatgatatatgctgctttatttcttaattcataagccacctcaatacctgccatattacatgcttcaaagattatgaattcaaataaatggtccgggagggccatagcaaaatctgttatttccatttcattatcattatcgatgatgatagaccgcgagccattaaccaatgtatgtggaggaagccagccactgccatgggaaaacacgattaaaccgtagcttttagcaggataaagccgagttacgtcgtttataactcgtttaagtacttggggggaggctgagttttcttggtcataggtatgtatggtaatatagcctttctcactttttccatcaatttccatcaatcgtggagagtccttaaatggtgtatcctgatacactattatttttccatctgttccgtcttgccatccatttttaatttgaacaagtttgtcataggtttccgcatcaagattattatctcctcccagataaaccaatagtgtccgtgcaggtaaaacaacaggggtgtcattttctttatgacagctacatactaataacagaaaacagacagcatatatatacttcatacacaatataattggataaatgattataaaaactaaaagaggggaacattttgcccccctctttttaaataaacaatgagcgtattaattacttgccattgtgcttcttaacttggatttggatagttccaacagaatgtccaagactattcttccaagtatggtcgcagataccgccccacttgtgatttacacaaacttctacatcaatagtaaatggttgagcaatatcttcaccattgttgatccatgtgatagtctgcttagtattatcaagtttgatcttattcatgttttcagcatccagttcacttccgtcagcaaagtatgccttagaaaccttgaagttaacagttgtattaacatcgaatacattatagtcaactaccagtttctttgaccaaccagcttgatcacctgtctgaaccaaagtattattctcagccatatctttgtggtcatagataacatggttgttattgaattgtgcctgagcaccttcagaccacagataatctgacaagaagaatgcatccttcaatgatactgtattttcagcttcttggtacttgtcatacaaaggacctgcttcgtaagcgtggaataccatcggagttacaaatgcaacttcaaattcatcgataaccactgtagaacgtccagattcaggagcagcagcaccagtataattagtagtatgatctttagcccaaggagtattgtttaccatattgatagtatcgcaagagaagttattgtaagcttctttagcatatttgttatgagcattggcttccttgttgcaagtaccatacaatccgtcaacatcttcattgaagcttactacagcacgcattttgatcttcttcaaatccttagcgtcagcagcattgatccaagcacgtcctgcgtctgttgcctccaaggcgatataccacttattgtcttcaccttgatacaaacggataccggaattgtgaccgtcagctatcttagatgcattattatgctggtcaaccaattcgaatgacaaggtagctctagcccaatccttatcatgagtctgacccttataaggattatagttgatcaaatcgaattcgtcattcaatgctgcaaccatttcataagttgtaggagcatcaaagttatcatatctaccgtgagcaatgaagtaagaatcatctacccagttcaacttggtcttttcaggagcaaccacattcggatacttcacattgatagtataagtaacatggatgtcaggtaatcccttatgatcagcatttggcttgtatgtacccttaacagtgtaaacgtcgtgatcgtcatgacgagagaatgctgtattcttcactgtaacgaacagctgattatattcttcaggaacaaaattcggatctaatgaatagtctttattatcttttccgtcccatgcatatacagcgtgttgtttagcctcgtctgctgtcgcaaattcaggaacaaactcataagtcttacggaattcgtctttgctcaactgtacatctttatggttgaatatcttatccatatccatatcaagaacttgattgatatgtttcagagtgacatcttttgtttctgtaatattaatttcaggaacaactgtcttgcgtacaatgtgaatcttgatgattgctgttttaactacattaccattgtcttcacccggtgctaccagtttcacacgaacaataggagttctgtctatagcagctgtgtgactggcatcagtttctgcaccccaaatcgggtccggagtttgttttactgtagcaacaccatctttggtaacttccaagtaacgtttagtctggttaacaccatcatagtagaagtcaaccggttcaaacaccaatgaatagtcatcaaaaccattatccatcaaaggatactgagcgtctttggcttttccactacggttatcaaagaaagaagttacgatatctcttaaatcttttgaatgtccatcgcccgtgtaattcagttctacaacaatacggtttgcatcatctttagattcagcatctcccttatataactggttttcagcattggcttcgaacttggctttatctgcttgataagcttttaatttagcctcttcagtaccagtcggatttaatgtgttaagataatattcatcttcgatgaattctctataatttaccttgttaggagcaattgcatttttaatctgagcaggagcgttagtttggtcaaatgcatcagcgactttaaccaaatgtacgtttttctgcaaaattacttcatgcttggcgggaacaaaatcagaatgaacgatttggtcattgttcttaattctcaatgaatatactgttctttcgtccagattagattgctcagcaaaagcccaatcctttacacggaagtttaacataccatgtccttctttataagaatcaacggtgatttttccatcagtgtatagcttttgtccggcattgaacaattcccaattcttgttatttgtattgtagttccatatttcagcagtatcacgaacaaatcctaccacttccatatccttgaatgatacgctgttaggatttacctgatacttcacgtctgccttacctgagtaaacgattttaaatgtattaaagttactttcactccaatctgcacctgtaatctctgttttacctgccacactatcagtaacgatggtagggaaatggattctggcagcttcaccttcagaaaggaaagtagggataaacttaactccgctaactacagaagtagctttaggcatactgatagtctttttagtgccattagcgtaagtaataactaattcataagctgactcaccttcttctactgatactacataatcatcagcagaagtacccggagtacctggtttgcccggttcaccttgttctccttttgcaccattgtataatttaatggtctctccatcactgaatttgatttcataaccaccattaccatcagtgaacggagtacagctttcgacatatttgcctgagcctactttgtcttcaagggccttgattgcatctttcacattggatatttcttgatccaagcggtcgatgtcgtcatcgtaatccttacaagatacaaatgttcctgttgaagtgaccataagggctccaaacaggattgcacttaaaaattttttgttcataatagaaaaactttaaatttataaatttaaaaactcaaaatgtttattgttataaaaggacttaattgcgttgaatcataaaaggactccgactctgcgatatatattgcaggggagtcatgccaactacttttctgaatgccacatagaacacgctcttggatgcaaacccacacttcctaaaaagagaactagttgaatacgtaccctctagtaataaggactttgcatactcaacacgatatttattaagaagctgcttgaagttgcatccgaagtagttgttcaccgcattactcaggtaggtcgtattcgtgccggatactatacagtaatactaattgtttgaataccagttgtatgtgtgacaactttaatgatgtaagggccatttcaggttcttttttatttataattgacaataatatccggtaaactatctactgctttttgtttgagttcatctatgatatgaacatatttttcagtgtgccgggtagtagaatgtcctgcaagactggcggctgttttgatattagctccatttgccataatgttggtgataaatgagtgtcgggcacagtggaaggtaatgtgtttgtgtatattagctctttttacccatttgtttaaaatccttagtgtgtaagaataggaggggagcccgaataccaagtcctcattaatgcctttatgcctttgtaggagtttgatggcagtgtggtttaagtttagatgcaagattgcgtttttggagtgtgattgtactttctgttgcagaatagtaaggcggtttgatgagaaatctatgtctttatattgcagttgatgtacatcacaccagcgcagcccgcaatagcaagaaaacaagaatgccctttttacttcgttgttggggcatggagtgatagcaagtttctgaatctcttttaaactgaggattgctttggttacttcatcaaactgcatcaggcggataccatctgtaggattagatgtcattaactttttttctatacatttattaatgcacattctgaacttcttgaaatatccgatgggagtgttgcctcggagatgatccctgagatactcaagaaagtttatacaaaaatcttttgtgagaagggttacaggtaagcttttctttcttgtaaacagtcgcagatgggtgatacatgccctaaccattttcttgtcctttttgtgataggtatccaggaattgtcctatcagaatatagaaatcgggaacattgcttttatctgttggaagtatatcattgaatgtattttctatatcgttcagatgatattcaacggataagaattctagttccttttttgctcttatctgcctggcaattagtatcttgtttttgttctccgctcttcgctctgcactggtaggagcatccagaatgatacccaaatactctttgcggcgttttccgttataactgtaatttaaataaagcgaaactcttcctttgttcaattgtttctttcctaatgtaattcccataatgaataataattaatacaataataatgttgaaaagaaggaccatagagggactgaaaatgaattcctccatctttctttctataataataatatcttttgtacctttgtgtcataaacaaaaaaatggaagaaaattttgatatacgcgagcaacagctcacaactaaagaacgcgattttgagaatgccttacgtccgttgaattttgaagattttagtgggcaggataaggtggtagataatctgcgcatctttgtcaaggcggcgcgtctgcgggccgaggcgttagaccatgttcttttgcacggacctcctggcttgggcaagacgaccttaagtaatatcattgccaatgaactgggagtaggttttaaagtaacctcaggaccggtgctggataaaccgggggatttggcgggagtactgaccagcttggaacccaatgatgtgctttttattgatgaaatacatcggttgagccctgtggtagaagaatatctgtattctgccatggaggattatcgtattgatataatgatagacaagggaccttcggcgcgtagtatccagttggagctgagtccgtttactttggttggagccactaccaggagtgggttgctgactgcgcctttgcgtgcccgttttggaattaatcttcatttggagtattatgacgatgatgtattgacaagcattatccgtcgctctgctaatatattgaatgtgccttgtgacatgaaagcagcgggtgagattgcttcgcgcagccgtggaacgccccgtattgcaaatgcgttgttgaggcgtgtccgtgattttgcccaggtgaaaggttccggaaggattgatgtggaaattgcccggtttgctttagaagccttgaacattgacagatatggactggatgagatagataacaagattttatgtactattatagataagtttaagggaggtcctgtggggctgactactattgcaaccgctttgggtgaagacgccggaacaatagaggaggtttatgaaccttttttgattaaagaaggtttcttaaaacgtactccgcgtggacgtgaggtcacggaactggcctatatacacttgggacggagcatttataatagtcagaagacattatttgatgattaaaagatggcaggattaaaagcattagccaaggaaacagccatatatgggatgagtagcatcatcgggcggttcctgaattatttgttagtaccgatatataccaacgctttgcctgtggaatcggggggctatggtgtcattaccaatatgtatgctataactgccttgttgatggtgcttttaacatatggtatggaaaccggctttttccgatttgccaataagggggtggatgatccgatgcgtgtctattccactactttgctttcggtgggggcgactgcggtcttgtttttaattgtttgtctttcttttctgtatcccatagcaggtttcttgggatatggagagcatccgtggtatatggggatgatgctgattgtagttgcaatggacgctttccaagctattcctttcgcttatttgcggtataagaaacgccctgttaagtttgctgcattgaaattgttgttcatttttgccagcattgtcttgaatatcgcttattttgtaggtatgaagggagagaatgtcggagtggcttttgctataaatttggcttgtacttctttggtgatgctatgtatgtggaaagaattggtgggcttcagatatgtgctggacagggagttgttgcggcgtatgctgcattattctttcccgattctgattctgggtattgccggaatcttaaatcaggtagctgataaaattatttttccgtttgtttatcctgataaggcggaggcgactatccagttgggtatttatggagcagccagtaagatagctatgatcatggccatgctgacacaggctttccggtttgcatacgagccgtttgtttttagtaagagtaaagaaaaggatagtcgggaaatgtatgccaaagcgatgaagtttttcattatcttcactttgctggcttttttggctgttatgttttaccttgatatactgcgttatattttagggcgtgattactgggtagggcttaaggttgtacctattgtcatggctgccgagatgtttatgggtatttatttcaatctttctttttggtataaactgattgatgaaacaaaatggggagcttatttttcactggtgggatgcagtatcattattctgataaatattttccttattccggtatttggctatatggcgtgtgcttgggcgggttttgccggatatggagtagctatgcttctctcttattttgtagggcagaaaaaatatcctattaattatgatttgaaagcaataggtaactatgtggtgttagcgctggtactttacattgtttcagtttatcttcctattcaaaatatattcttgttgttgggtgttcgtacattactgttgttattgtttgtggcatatattgtgaaaacggatttccccttacagcaaatacctgttataaaccgatacataaagaaatagcaatgagtgacctgaagaataatttaaagaatgtgccctatataaagcagttctttagtgaatatcttgatttgcgcaaggataaggacaatgaagccttgattgtagaaagtattcgtaatggtgttgagttcaaaggaactaatttgtggattcttattttcgcaatttttatagcttcattgggcttgaacgtgaattctacggcagttattattggtgccatgctgatatctccgctgatgggaccgataatgggagtagggttagctattggacagaatgattttgaattgttgaagcgttctctaaaaagttatttggtggcaactgtatttagtgtgattacagctaccctttatttttcgctgactccgttggatgaagtacaatcggagttgctggcacgtacttctcctaccatatatgatgtgcttatagctttgtgcggtggtttagccggtataatcgctttgtctacaaaggagaaagggaatgtaattccaggggttgctattgctacggctttgatgccgcctttgtgtactgctggattcgggcttgctaccggaaatttactttattttttaggtgcattctatttgtattttattaattcagtatttatcagtttggctacttttatcgggatacgtgtcatgcatttccaacgtaaggaatttgtggataaggagcgcgaaaaattagtcaaaaaatatatcattgttattactttagccaccatgtgtcctgctatttatttgacttatggtattgtgaaaagcactatttatgaggcctctgccaataattttattaatgaagaattggattttaataatactcaagtaatagaccggaagatttcttttgagaagaaggaaatacgtgttgtgctaataggcaatgaggtcccggaaacagaaatagcaaccgcaagggataatttgaaacattttaatttggcaggtactaaactagttattcttcaaggaatgaataatgatgcgatggatattggtagtataaaggcccaagtgatggaggatttctataagaatagtgaaaagcgtttactggagcagcaggagagaattaagtctttggaaaacgagcttaaagtatatgctgcatataatactgtagataaaaaaataattcctgaacttaaagtactttatcctacagtagaagccatagctatggcaaagactgtggaattacaggtggactcaactaaaacggatacattgacaatagtcttgatgaaattcagtaaaagacccattgagaaagaacaagaaaaaatatccgaatggttgaaagcacgtgtcggagcaaaaaaacttaaattaattgtagaataaaaccatgaaaaaactactgttgctgctagtcttcctacctttatatatatggggtagtgaaggaatgtggcttccttgttgtcttagcaaacaaactcaacaagtgatgaaagaaatggggttggaactttcatctgaacaattgtataatcctggtggaaaagcattggctaatgctgttgttagttttggaggtttttgttcgggtgttgttgtatctccggatggtttggtttttactaaccaccattgtgggtatgatgccattcagcagcatagttctgtggagcatgattatttgcgagatggttttgtagccgattccttaagtaaggagcttcctaatccggatttatttgtcagttttctgatacgcacagaggatgtgacggagcgtgtgttgcaagctattccagtcggaacaaaggaaaatgaccgtgcactgattgtagattctatttccacattgattgctcaggaagctgtggcgaatgatacgttgctgcgtgctgagataactcctttttatggtggcaatgagttttatctatctgtgtataaggattattatgatgttcgtttggtatttgctcctccctcttctgtaggcaagtttggcggagatacagataattgggtatggccccgccataccggggatttctctgtcttccgtatttatgctgatcagaataatcaaccggcagcttattctccggagaatgtgccttatcatccggattattttgctcctgtttctttgggagggtatgaacagggatcattttgcatgactatgggatatcccggttctaccagcaggtatttatcttcatttgggatagacgaaagagtcaatacggataatgccgccatgattaatgttcgtaccatcaagcaagctatttggaaaaatgcaatggaaaaaagtgatgatatccgcattaaatatgcttccaagtatgcacaaagctctaactattggaagaatagtatagggatgaatcaagcggtaaaagaattgaaagtgatagagaaaaaacaagctttggagtgccaattgcaagaatgggttcgtcgggaacctgataaacgaagcaaatatgcaagggttttgactgaactggagttaaattatcgtaatcgtagaaatgcggcacgggctatggcatattttggagaaacatttgccaatggaccggagttgattacggcagccttagctgtactgaattttgattttgaggcagaggagagtgatttggagcgtaatatgcggcaattgttggagatttatgccaatatggatataagtgtggataaacaagtctttgtggctatgttgaaagaatatgcaactgaggtaggcaaggaatttttacctgatgtttattcattgatagagaaagattttaaaggtgattaccaagcttatgtagatgatttgtatactcgttcctctttaaagacaccacatggttttgaacaggtagtgagaggagataccacttatgtcttgtttgatgaccctgcggcttcttttgccatcgatatgttggtgaaattttatgaattcaatcagtcggtggaagaagctagtatgaatattgagaaaaatgaacgtttgctgaatgaagcaatgcgtgagatggaggcagatagggtgttttatccggatgctaattctactatgcgtctgagttttggcatggtgggtgggtactcaccgaaagatgctattgagtattcttattttacgacgacaaaaggaatttttgacaagataaggcagtataagggagatagtgatttcgatgtgcttccttctgtagtcgaatgcttgagaaggaaggatttcggacgttatgctgctggggatggtaatatgaatgtttgctttatttcggataatgatattacaggagggaattccggtagtggaatgtttaatggaaaaggggaattaataggtcttgcttttgacgggaattgggaagcaatgagtggagatattgtttttgaacctaatttgcagcgttgtatcggggtggatatccgctatgttctttacatgattgaaaaatatgggaaagcttcctgtttaatcgatgaactgaaattgaaagactaaaggaaaagtatgaaatgacagggagctgagtatgtcaaagttccgatagatagcttatcatataacctgaattcaaacagacaatgcaacagtgtcgaattcattgttagttaataatttatatttttcctttggggtcatgtaacccaatctttttctcggtcttgagtttaagatgttttgaacgcgcattacctgttcattggttatgtccctaaagtccgtacccttcgggaagtattgcctaatcaaaccattgctgttttcattggctcctctttcccacgagtggtatggttttgcaaagtaaacaaaaatatttagtttacgtgcaatttcttcgtgaaaactaaattcttttccattatctgccgttattgtatgtatttggtctctaaaaggttccaaggcatcgatggcagctttagttagcgggctggcatctttcccgctaagtagtcttatccatactagtccagttaccctgtcgtttatagttaatagtgctcctttgtgattcattccaatgactgtgtcaatttccaaatcaccaaaacgtactttcttgtctactatcgtaggacgcttgtctatgtccacgcggtttttgataaaaccacgtccattagtcaatgcacctctcttcttatgacttcttccccgtcttcttaaatgcttgtataacaacttatctccatgctttttatcttcccaaatatactggtagattgtctcatgagaaactgtttccaagccctttgttcgcataaacccagtcacttgttctggactgaaatctttctttatgagtatatctacttgaattttcaagtcgtccgtaaacttcacgaagtgctttcgtgaacgcattctggacatatacttagcctgagcgagatccggtttgtaaatgccattacgtttatcactattacgacgtaattcacgacttatagtgctacgatgaactcctacaagattggcaatctcggttcttgactttccgctttgcagataagcggaaatgttatacctttgttcttcggttagctgtttcatattgcaactgaatgttggggaactggaagatgcaaagaaacaacttttccacaggggaacaaaagggaaagaaatcttctttctctgttcctctgaaaaattattcttttcgtatcttctcattgtcatcattctcactcctgttgcattatccgcttgaacttaggtaatctttcatctggaagatagtaaaaaatctgttaatattaattcgatgtaaacaaggatattcggcaaataatataataaatctgttgggtttattatattatttgccgaatatccttgaaatgacaggttgtttcaattccgcatactccgctattattcaagagaagtggatgttatttgcatatttctactatgtccaatcctctttcattaagttggattccttatttcttggatttctttttcttattgttatcgctgttaaagaattgtttccagtcgtctttcgttttggggcctcgttcttcaatgtagccacgttccgcacggctagtttttccttcttttgaggtcgtttttttattggacctgtcaccttttttgccgaatgaagcattccttgccgcactgctcctgcgttcgccattgtcgtttttgccattattgtcaccggcaacttctactacaattttccggccgccattcagattgaccttgtttaacgccttgataacatcctgtgcctgattttctgctacttcgaagaaagagaaattctgcatcagatctattcgcccgatggtggtacgttgcttcttcatgttgcggttaatcagttcaatgatttgattggcataaaaaccatctgtctttcccacattcaggaacaggcgggtatatcctttctcggccttgcgttctgtcttttcacgggcgctaccatggtctttgcgtcctttcggttcacgttcgctacggcggtcgttcatgctgggagtttctatttccggagcgttgctgtaatattccaagaagcggttgaactccatcgatactacacgctttatcaggtcttccttcgaaagccattccagtttgcgatagataccgggtaggaaggactcgatttcctcgtcgttcacttttaccttttctatatcatcgatcagtttgattaattgttgttcgcagatttgtttaccgctaggcatttcacccatgataaatttcttgttgatgatacgttctatctcgcgcatttttcctttttcacgcagattgatgatagcgatagaaataccggttttgccggcacgtcctgtacgtccgctacggtgagtatagctttctatatcatcgggcaggccataattaatgacatgtgtcaaatcatttacatccaaaccgcgggcagctacatctgtagcaaccagaagctgtaaatgacgttgacggaatttctgcatcaccaagtcacgttgtgcttgtgaaagctcgccgtgtagagaatctgcattataaccatcttgaatcaatttatcagctatttcctgagtttccttacgggtacggcagaaaatgataccgtaaatttgtgggtaataatccgcgatacgcttcaatgcagcatatttatctttggcgtgtaccagataggcaatgtggtttacgttcttgctgccttcattcttagtaccgattgtaatctctttcgcatcgtgcaggtatttttttgcaatacgcgagatttcgggactcatggtagctgagaacatcaaagtgttccggtcttcgggaaccttttcaagaatagcattgatgctgtcggtaaatcccatattcagcatctcgtcagcttcgtccattactacatcggcaatggtctccagtttggcgacttttctttccatcaggtcaatcagtcgtccgggagtggctacaataatgtgtacacctgccttcaacatgcgtatctggctttcgatggatgagccaccgtatacaggaaggactttcagtccatcaatatacttggaataatcattcagatcacctgcgatctgcaagcataactcacgtgtggggcataatataagtgcttgaggcacacgtttttttacttcaattttttggataagcggcagaccaaatgcggctgtttttccagtccctgtttgtgctagggctactacgtcgttgccgttccccaataaatacggtattacttcttcttgtaccggcatggggttttcataccccatttctttaattgcttttagtatttccggggaaacgcctaactcttcaaatgtcttcatttattttcaaatatctaattcgttacaaagatacggataatcacgggattatatagtatttatacaatatttgttttcttcagggatagaatttagggaatattggctaaatgccgtttgggagcaaaagaaaaaagtcgttatctttgtacccgaatgtagtatatgacattggtggactgcaatttgaacaatgaaagagtttcattacatattattctcaatctttctttcttccatgattatatatatgggagtcggaatacctattgtgcagtcccgttgctatcagtgcgctgataaggatgcggcattattgacagtggtggatatttccaattatggatgtacttgcggatgtggtgatgttggaaataaaaacgtgaaatctggttcgggatgttcttgccatcatgacaagatgatggagcggaagtcatcagatgttccttgttctagcgtgaaaatccagaaaattaacttgcctgttttaggtacatcacttcatttggacaacgtaacactgtccgttattcatttgatattcaatgcatacagtgtaaacttcgatctgttgtcttctgtaaaaaaggagagctgctatacggatacctcattgtgtcgacagcctccaagaggatatttgaatcttatttgtacacttttgatttagtaagataactctttgggtagggaagaattgctaaattgtataagtgtgtaacagataaagaaaaataaaaacatgaaatttatagttttcttaggtgcttttctgtggcatttgatgcctgtaagcgctcaagtaaaaggaatggtgaaggacaaccaaggtgaacctgttgttgctgccaatgtcttttggataaatacaacaaatggaactgtcacagatgagaatggggcatttactattgaacagcctgttggtgcaaaaaaattggtcgtaagttttataggatatgagaatgatacgattgtggttgaaaatgatcataaggagctggctatcatattacaaggtagtgtaatgatggatgaggtccaagtggtggaacgtaagataggagttgtaaaatcccgttccagtgtgttgaatcaggatatgatttcaagtgcggaactggctcgggcggcttgttgtaacttgggtgaaagtttcacaacaaacccttctgtagatgtaagctatgctgatgctgccacaggggccagacaaattaaattgttgggactctcgggaacttatgtacaaatgctgacagagaatattcctaattatcgtggagcatccgctccttttgctttggggtatattcccggcccatggatgcaaagcatacaggtgtccaagggtagttcatctgtaaagaatggttatgaggcgattaccggacagataaatgttgaatttaagaagcctcaaactacccagtccttgaatgtcaatctttttgctagcagtaaagagaagtatgaggctaattttgatgctaatgtacatttgaatagccgactgagtactggagtattggcacattatgaaaatagtactaggtcgcatgatgataatggagatggattcttggatatgcctaaagtagagcaatataatcttcagaaccgttgggcttggatgggagatcagtatgtatttcaggcttctgtcaaagcaatgaaagaggatcgtacaagcggacaagctactcatttacatgtggataattctgttggtggctttgtaggtagggaactttataaaataggtatccatacggatcgttatgaggcatttactaaaaatgcttatatttttgataaggaaaagggaactaacttggctttgattctctcgggatctttgcataagcaggatgcaggatacggttataaattatataatgtggaccagaagaatttgtatacttcattaatgttcgaaacgaatttcgatgagcgtaacagtatttctgcagggttaagtttgaactatgattatttcaatcagacctatcgtttagaaaatgatgatacaggtttattatatggaaaggagaaagagaccgtgcctggtgcttatgtgcagtatacgtataattggaaggataaaattattcttatgggagggattcgtgctgatcatagtgatatatatggtacctttgttactccgcgtgctcatatcaaatatgctcctgatgattgggtgaacctacgtgtgtctgtaggcaaaggatatcgcactaatcatgtgttggcggagaacaattatttacttgccagcagtcgtaaagtaaagatagataatgatttggatcaggaagaagcatggaattatggtttcagctcttcattttatattccggtattcggtaaaaccttgaatgtgaataccgaatactattacactgattttaggcgtcaaatgattattgatttggatacggacccccacattgtacattttgctaacttggaagggaagtcttattctcatacttttcaagccgaggcaacttatcctttttttaagggttttacattaactgcagcttatcgcttgacagatgtgaaaactacttataataagaaattattggagcgtcctcttaccggaaaatataagggacttttgactgcttcttaccaaacaccactgggcctatggcaatttgatgtgactttgcagatgaatggtggtggtagaatgccctccccttatacattgccggacggtgctccttcgtggaatacccgataccagtcttatcaattgttaagtgctcagattactcgctggttccggcattggtctatttatgtgggaggagagaatatgacgaactttaagcaaaagaatccgattgtaggagcttcgaatccttgggggacaaattttgattcaaccatgatttggggacctgtacacggagcgatgtattatgtaggttttcgctttaattgggatagaaactaatatattgataatcaaatagaaatggattatgagaacaaaattaatcgctattatggcagctgtctgctttactgccacttgctttgcaaaagacattaaaattgtagttttaaacactgatcctcagatgcactgtgccaactgtgagagcaagattaagaacaatattcgttttgagaagggtataaaagaaattgaaacaaatttggcggataaaacggttactattaagtatgatgctgataaaaccacggtagaaaaaataattgctggatttgccaagattcattatacagctactgttgttgaaaatgagagtaagcagaaggatgatatccgtggcaaacagccgaaagcagatgaggatggttgtaaacaagaaagaggaaaatagatgagatgctatgtgataagagggaaaaaacgatggaatggatattttgggaactcttttgcaccacttcgtggctttaaatgactgataaataagatgctatatcagagtggaaaggggtttaaccacctagtggaaaaagaggaaatatcaatcttggttaaaaactttattataactgcatcataaaaagactccgcatgaagcaattaatctttaattgcttcattgcggggtgtatgggtgaagatgagagaattttatagtgttcgagtgtttgtgtatgtgactgtttatatcattcatcttcttccctatattctagaatatctccaggttgacagtctagttccctgcagatagcctctaaggttgagaagcggatggcttttgccttcccggttttcagtatggagaggttggcaggcgtcagatctatcttttcggctaaatctcctagcgaaatctttcgtttcgccatcattacatctaagtttactataatcggcataggttagttattttgggatttattcgggttctcatctaatgcgtgccaccaaaaggtgtagcgttgtgttagtcttttaaaggcatacagacagaagcaagtccatccaatgttgattgatatcctcactgctttgttgtccaacgatggatgcaacacaaggaaatagatgaatgaacttacaaacagagtggttgtcaaggaaagcattaaataaaaaatgcttttcccttttgagggtagagtattcttttctttcataacttttcttttttaaatggttaggtcttgttcctctttcatttttactccgatagcaaatatctcggcaaagaggatagggaggattattgccacccagtcgggggaataaccaacatagctgatgattttgtaacccggtatgctaatttgattcatagctgcgcttcctgttagccattctccgatggctgtgagaatttttaaacttgcgctggtatatgcaaaccaacgtaggcgtagtacattggctggtgtaaatactttgcggcgtgagatggagatgagcagccggattaatgagtaaaaaccgattagaaaaaagaatagtccgggtatggctaaccctatgacaaggatataccaggccgatggcttggcatacgtttctatttcagttactgtataaggaagtggactatctacacggttgttgttcagtgaatcgactgtcgttccagataatggctttacatttagtttgacacgggttatcatgtggtgtccggattcatacatctctgttgcaccgctttgtccttcttcaaatccctttttgaaatctttccaatcttcatccaatcctccgatgaaatttgcaaggattgcaataatggctataatacctaatatcctgaacttcttcataccgtatgatttttatatggttaaatcttgttcttctttcattttcaatccaacagcgaatacttcagcaaccagcaatgcgatgaatcccaatatgaaggttggttcggaaaacgcaaatatattagagtattcacatcccttgagttccaaaacttgtgccgcttcatagttcccgatcatgatggtggtaaaagaacaaatgaatagaagtatcagtgacacacccagcttgcggagaaacttgacgttcttccaactgaaaatgtcaccacggttgatatttcggatcaaatagaaaaattgtatcaggcagaagatacttgctaggaccgaaattaaggtagtgattccattcgccgttcgggataggctgcttcctgttgtcggggcttctatcaaacttatgattggtttgatggaagcctgtgaggaatttttcagatttgtcacgcttcctgtttctgcaaataggtcagaaggtatcgtacaaactattttgtagtcggatatgttaagctccttccctttttctacactttcatatccggctttaaacccggcactgacggcttgaaccatcagactgattaccgtggaagtagaaaggagcaggccgataagtacgcaggcacagagaagattgagtctctttttcatgattggttgtgtttgttaaatggttatatcttgttcattaatagctttgacttgtatgttggtaggtttcggcaagtatttgttcaggtagagatacatacctataaaaacgattatggctagtactaagagaatgtaagtgattgttgtgcccaaggtctccatagtcgtttggctgagttcctctcgggtggctgtgaacatggtccatgcgccgaatgagttgttgataatgtgtcccacaatacctggaactaaacttccggtgcgataatataaccatccgaagagcagaccgatgagaaatgcaaaaggtatttgtgcaggattgccgtgtatgatcccgaatatgagtgcggaaaccagtatggcccatttaggtgaccatccttttcttagtaaatgtccttctatagctccacgaaataaaaattcttccaaaatagggacgacgatagcaatgctgagaacaccgaagatattatggctcatcgaaataaatagttcttgattagtgtctgtcagatcgagcgcttcatttaatattcctgctatgaactgtgcggatagcaggagagggatgcacaagagaatgattttttttgaaatttcatacatactctttttattgaacttgacatagtggaaatgtaccaagtgccatgtcatggctaatgcggagagtaacataccgatggatattgccattgtcccggggcggaagttggctgtaatatctgctccgccgataagagcaatggtggcatcggttccggttgccagaaaaatgaatagtaattgataagccagatagtaaagtatcaatttaattgcacgtcccataataatctgtttattggtttaaaattttattaggttggaagtgtgtcaaaatgaaaacgacctatcattttgacacactttcaatgatatttattttttcaggtgagcatccaggaagttctccatggcacgatagaaatcgaatttgttctcttcgttatggaaaccgtgtccttcgttgtcttttaccatgtattctacttctataccgcgttttttcagcgcttccaccatttggtcggattctgctttattcacacgcgggtcgttagcgccttgtgcgataaagagaggagctttgatttggtctacatgaaatacaggtgaatatttttccatcatttctttatctttcacaggatcacctaccatttcatacatcatgtccaataagggtttccaatagggtgggatagtctgcatgaaggtgaacaagttggatacacccacatagtcgatggcacatgcataaagatcaggagtaaaggtgacccctgccaatgttgcatatccgccatagcttccgccgtagatggctacacgtttcgggtcggcgattcctttttttatcaaccactctacgccgtcggtgatgtcgttctgcatggtttgtccccattgtttgtagcccagttcggtgaatttgcgtccatagccggttgaggctcggaaattcatttgaagaacagcatagccacggttggcaaggaactgtacttccggattatatccccagctgtcacgtgcccacggccccccatgcggattgactactacaggcagatttttggcattctccatggtgtatcctttcgggagagtgaggtatccttcaatggtcagaccatcccggctggtataggtgatggggtgcatcgggaccatatcttcttctttaatccagggagccaagtcagctattttagtcagtttgtcttcttttacattataggtataataagttccataagtgcggtcgcctccagcataaataatacggatattttcgcttttatcttcgctggtggtgttgatatcataaccttccagtttctgttccaacttggtgcggatagcttcttcgtttttatcgaagtaatgacggatagtacctttgtgtccggtacaggatacagagattaatttctttttcagttcagaatagcctaatccggaaatatcatatttatcattggtgtaaagtacttctttttcctcacaagtagccggatccattaggacgagggcggtcttgtcccgtccgatgttggtcagggcataaaccattttattgtcgggggtgaaggtggcaaagcttaccgtttccttgaaattggtagttagtaccggacggaagggctgctcttccgtttcgcgatagagaatttgggtatttactccgtctacaatagctaaggctacacgcagttttccgttatggtcagtcatccatccttgtatgtttccggggttctcagctaattgggtcagttcgccgttattgagattcaagcgataaggatcaaatacttgtggattacgcttgttcagaccgatgatgaccagtgagtcgatattttccaacggatcaataatagttgtccttaccttggggaatgcggtatatgctttggagtcagtaccgtctacattgactccgtagagctgaaagttttcatcgccggcagtatcttttatataaagtatccgatgaccgtttgcccacatgcttcctgcaagatcccgtaccgtttctgaagtgattcgggttgctttgtctgaaccgacttcttgtacgaataagttcaggcggttttcatacggagccatatatgagaagtatttgccatccggtgagatttggtatcccgctttttcaggattcttgaagaagttttctaaagggacttgtgcattggcttcggaggcgaaaccgagtgttaccagtaaggttgttgcggctaaaatgcgttttaatgttttcatcttgatgtattttaaagttgttattttatcagtttattaaatttgcaatggcttgtttacaaggaacgtaccaatgttcaatgaataggatgaacaatattaaaagaaagataatctcggacttttgttgtgctctttgtgctagaggggtatttaatggaattttaaccagaatgagtttcccaaaaactattcccatgagcatacccagagctagaccgattgatggatatacaaatccgataatcattccaatacacactccgatggtttgccatcggttggttatactgttcttttgagtttgtgcttccattatttcttgttttgtgtgtcggccagcaaatttatgttgttgtcttcacggtaaatactttgttgtttgttgttgttgaaggcgctttccttgacgttccattcggcatagttgagtttggtttcatacactccgggagttactgtaagtaaataagccggtttccacagttcccgataagcatcccagcgataggcttttttctcaattacctgaccattttcatcgtgtttgtactcatacttcaatttgcgtgtcaatgttttgccgtcttcattcagtgtatacactgttgtgtttgtgccgtcttgaccgtagatgtatttcgtgtttcctgtttgtgcgtttgctgttgttgtacaactcatcatcactactgcaattgctgctactaaacctgatttaaatactgactttttcattttactttgtgttttaaaagtttgtgtttgttctttcttgtttttcgatattcatttatcgtttatcgatatgcaaatgtacatcttattttgatactacaaaagaaaaacaagaaaaaattatcgaaaaacgataaaaatatatcctttataagacaaaaatgaatgaagaaacgttttttatgcgagaagagaggggcggaagggggaggttacatctttcgggaagaaaaccacttatatattttttcggaaaagtaagtgcacttgcttttttccgtcatattaaagaagaattttagcggtttcctccctgtctttgtgcatttgggcgatgagctcatctattgtgccatatttttcttcagggcgaagatactttacgaactctatgcgcatttctttgtggtagatatcctccgagaaattgaggatgtttacctcgatacttacattgttgccattattgatagtagggcggtgtcctatgtttaacattcctgcccattttttcccctccacatacacgtatactgcataaactccttccgagggaattaatttgtcgctacaatccacttgcaagttagctgtggggaaccctatttttctgcctactttgtagccatctaccaccgttccatccagataatagttgtaccctagaaattgggcagcctgacttactttgccttcttttaacagctgacggatgactgaggagctgattttatcctctccgtctgtataagctcgcgcgcgtactatatatatatttaattcctcgccataacggcaataatcttcaaaactttcactgcggttgtggccgaaacgatggtcatagcctataactaaggtgtgaatattgaatttgttacgtagtaactgcatgaattcccgggccgaaagcagcgaaagtttttgtgtaaaaggaagaaggaggcagtaatctacttgcgtcgtttccaataactcaagtttttccttgggtgaagagagcagttgtggatgataagtggtttgtatcacttgtctgggatgcataggaaaagtgaccaatgcagaatataatccatccttgtctgcgacctcttttacttgattgataagaaagcggtgtccacgatgcaccccgtcaaagaagccgatagtggcaactgaagggggtaatacttgatggtttatatctgatattatttccattattcaaaaagtgaacttaaattttctccaatatgatagtgatgggattgtataccaagtgacatagctgcctggcaattagcttccgagtcgtctataaagaacgtttcttcaggcaggatgtttgcctctttcatcatttgctcataaatgtttttttcgggcttggctttatgcatctcgaaagacagaaaagtatcttcaaaaaaatcatttacgcggaaacctcgataactgaacatctgctcgcaggcatactcccaatgtatccgattagtattactaagcagataaaccatatagtgttcgcgcaattctagtaataagtccagcttctcacgaggaatatcaagtagcatcaggttccacatatcatcaattttacggtcggtcagtgattcgctggcctccttgcgaatggctgaccggaattcttccggactgatctcacctaattcaaatagggaaaagaaacctttccccttgaactggcatacctgtttctcgatatcttggaatcctgctttgcgaaaagcattcaggcaattgtcaaaatccagatttattaatactcctcctaaatcaaaaacgacatttttaatcttactgtccataactctttatgtgcttaattctctttcttagttttttttctgtattcgttttatccaacggtgaatttcaccaatccacaatacgaatgacgttcctgcgataatataaatccaagtaataaaatccataggttcggtacggaatactttacctccgaattcgacaattagaatttgtccgaccaaaataatgatagctacactcagcatacccaatgcatgacgggaatccttaaatacagaatggttggtcccgaaaacactggcgttgaacagattccagaattgtagcatcacgaagattgtgaaaaattgcgttaaagcttgtcctactaaatctgctggcatctgtttgataatgacaattaatgtcatcagtatagcaaggaaacagaagcctacgcctagtatatttttgcgcatgaccttagtgatgatgaagtcgtcggtcttgcgtggcttttcattcatgacatcggcactgggggggatagatgccaaagccatggcggcaaaagtatccatgataagatttacccaaagcatctgtgttactgttaatggtagttctgtaccaaagaaagctcctaataaaacactggctaaagcgaccacgttgatagtcagctggaatacgatgaagcgctgaatgtttttataaagagagcgtccccacattactgcggtggcaatactatggaacgagtcatccagtagggtgatatcacttgcttctttggccactgatgtaccggttcccatggaaagacctacttgagcatgattcagtgccggggcatcgtttgttccgtctccggttactgctactacggctcctttttgttgcaatagttggaccaaacgttgcttgtccataggacgtgcacgactcataactttcaagtcaagtacgcggtccaaagcttcttcatcgcttaatgcggcgaattctacccctgttatgcggttccggtctgtatcttcaggtttccatagccctatttggcgagcaatttcagtagctgttcccggagtgtctcctgtaacaattttcacaccgatacctgccgattgacatttttgtacggcttccggtacatctggacgaatagggtcgctgatagctacgatacctaggaaaatcatatttccttcattgacaagttcggcacaatcattgccggagttttcaggaataaatttgtaagccaaccctaaggtacgcattgccttgttctggtaggccagcaaatcggcattgtaatgagtcagttcctcaggagagaggttacattttcccattacaatttcgggagctccttttatatagagtacctttttctgttgaataggtgaatctactaatgtagccatgtacttacgttctgtagagaaagtaagttgattgattacttttgcattttcacgtagttccaaatagttcttgccttgttcatttagccaaagcaataaggctatttcagtagggttacccactccggatggttttttgctttctcctgtttcttcaaggaaagctgtagagttggcactgataccttcggctattaaatctgctttggtagcatcaagcttcgcttcatgtacctgcatcaggttttgtgtcaatgtacctgtcttgtcggtacaaatcacagtaatggcacccattgtttcgcaagcatgcattttacgtaccaagttattggttttcagcatacggcgcatattcagtgcaagacttaaagtgacactcatcggtaagccttcaggaacggctactacaattaaagtgacagccatcatgaagtatttcagtacaatgcgggcaattgccatccacccatgccagtcagttatttcatttacgctgaggtaggagtaaagatcttttgctgtaaaaacaataaaggtgagcgtggcgatagtaaaaccaatttttccgatgaaaccggccaatttggttaattggatattcaatggagtttcttcttcactttgttcggtagcctgacgcgctacttttcctatttcggtggaatctcccacacgttctaccttcattattccatgtccgtcaaccactgtggtgccacgcatcacctcattgctggggtaagtggcctcttcatcaaatagttcttcattgatagttttgttgaccatcaattctcctgtcaaattggattcattcacttgcagggaaatagcttccagcaagattccgtcggcaggaatctcttcaccagtattcagcactacaatatcacccactacaatctctttacgaggaatttcccgtactttcccacttctgataactgtgactggtgtttcttcacctacagcattcagtaagtcgaacttcttgtttgcgtcgtattcaaagtagaatccgataccagttgccagaaagatagcaaagaaaataccgattgtttccgcatactcattttcaataatggaaatcactaaggaaaagaatgctgcgactaaaagaatacgtataaccgggtcgcggaacttttccagataaagtttccacatggagggacgtttgggaggtgtcaggaggttagtcccatgtttctccctactgataaggacttctttgtccgaaagccctgttagggctgtttcctgttttttttgtgccatatggctttgcagaattaattaatggagcacaaaaatacaatttatatccttacgaattagggaattaaatctttttatcaaaatttgggcgctaaatcttgcaagtttcaggagaatatactacttttgcatctgctaacaagaaattgtgagcacggacttgtagctcagttggttagagcaacagactcataatctggaggtcctaggttcaagccctagctggtccacaagaaattgcctcataaacaagtgtttatggggcttttttattaggacttcttctctttggatttttgaaatactgacaagaaacaggctgttttgcttcgttgttgacctattgttgaccccaaaataagtaggttaagatgttgacgattaaagcagaagtccaacaggacaagcaaagaagtgatggaacatataacgtaaagatacgatttacgttggatagaaaggtgaaaaggttatccaccagtctatttgtgacatctaaagaactcacaaaatctttcaaattcaaagaagacactcctatcaaaaaggagattgacaatcttttattttattacaaagaacagtgttgtaagctccaattagaccaaaacgattatacattggagaacatatttgatttcctaaatggagaacaagagaagaaacaaaccattgacttcattaagttcagtcgtgagtggataacctcaactacaatcaaaggtgcacccaattacacgactgccgtcaatgctttagtgcgctttataggtaaagaggaattgaatattaatttgattacccttgatttcttagaaagcttcaaagtgtttctgaataaagagcgtgaagtacgaacgaagaaactgattctgcaaggtaagcgcgtaccctctaaccgttctttgtccctttatttggtgagcataaagaaactgtttaatgaagcaaagaagaagtacaacaaaaaagagaaaaacctcattcttatacccaattctccttttgttgattttgaaattcctaagcaagaagcaacaagaaagagagctatatcagcagacatcattaaaaaggtgtggaaactgccttataaaaacatgaagaaaggatataagtcaacctgtcgttacaacttggctaaagattgcttcatcctctcattctgccttatgggaatcaattcagcagacctttataatgctactgaaatgaaagggaatactatcatctataacagaaccaagaccaaggctcgcaggttggatggcgcaaaaatgatggtggatattcctaagatagtgcaacctcttattgataagtacaaggacaccacaggcaaacatctgtttaatttctatcaatactatggggatgaaaaaacttttaataaagctatcaattacggtctgaaagagattggggcaatattagatgtggacgatttggaatactatgcagcccgccattcatgggctaccattgctctgaacaaagcaggcatagacaaatatatagttcatgccgcccttaatcacatagacgattccatgaaagtgacagacatctatattgagcgtgactttgtaaatgagaacaaggctaatgccaaagttgtaaagtacgtgtttggcaagtaagccgacaaattccccacttgtagcaatgctggtggggattattttgtaattttgcaaatacactaaaatttattagcatgataatacaccaatatacttctattgatagtttagccttaattcttaagaataaaacaattagatttaagcgattagacaaaatggatgacattgaagaagctgcattaagtaatgtaggaatccatttaggaggttttatgtttgtttcttgttggacttttaatgaaattgaaagcattccattatggaaaatgtacacacctgcaactaaaggtgttagaatctcattagacaagaatatgtttaaaaagcatatcgttactaaagaagattctgaaaaatatcatatacagactaatggagaaagtttttcatcaatcattccagtagcaaaaatgtttacctctcaatatactatacttaatacattctggaatgaagactttttttataagaagattgaatacacagatgatttaaatcaaatatataattcactaatacaaaataactccaatggcgtttctttaaattttgacaacgttggtagattcaaacataaacattgggaatttcaagatgaatgtaggtttagacttattatattgccaaatgataacataaatattggtgataaaaggtacgcaacttatatccattcttgtgtaaaagaagaacgatttcctataatagattcattttttattgacttaaaagatgatgcgtttgacaacttaagaattacattaagcccctacgcaaccgaagcagacaagttgattgtaaacgctctatgtaaagaatatgctcctaatgcacatatcattaatagttctctaaaaggaaaagtaagaatataacaccatgcttgaagtaacatttgacatatcaaccataaagaagctatatccagaactgaacagatgctttggcttcacctatgacgacatatccaacgaactgacccaggtctatgcccaaaaagtcttcaatctgacaccagaagaaaaagagtttgccaaccaatgcaagtcagatgatggttggggtgtggatgcggtaaagtttgcattggctaccaatgagaatatagcagtagcagttccagacagctttaatccaaaagcaatcgtggaatcgtatgcggctaaacttcaaaatgaagaatcagtttcatgcgcattactgttcatggctgcgcttctatacagggacagaataacagaagcccccatatcagaaggagaatatgacgatatgcaataccagcaatatatccatgaagtcagacccgatatgctaaagctatacattgccctcaaccagcccaagcagaaaaatgggaaagacctcaataccgatataaagattgcagtaggtggcaattctccaatacttatcaataacaaggacagttggctggagaacaaactgaatgaatacctgcatcaatatttgggagtaagcaatttagaggaagctcacaaagaattggatttcatttatggaaacaagacagtgggcagtaagaagattgaccccatccagtcactttatatatggggaacatatcagttactccagagcacacatttgaaatctataacagaaaaagtcccgacaagaccgcaagccaatttaatagaatcatatcttaaagctatcaaactgattaagacggatgatgatgatacggatgcgaataatatcagaagcagacttaaatattttctgaatagatacgatacagtagaagcactgttggactataggacattcaaattatcaccttataatataggtggaactaaactttggtaaactcaactcaccttatataaaaaggcagctcttacggtggtaaagaactgccctttttttgccctaatattattaatccagccccattccaatattctacttttgcaccgctttcaaaaagaagtggtgttaatactttagaggatagatgttggtaaaaaactcgcttaaacatacggttattctttaccaattcaccttatgagaacatcataactttgcaacgtaatcaaaaacaaaatggtgcgcaccttttaacaacgattacctgccagtccttgcagaagaagggcaaaattattaatccataaaattataataatatggaatttacaattaatggaacatctgttccgcaggtagaaaagtacgataatcaaggtgcgcacaatgccatcaagtcaatgatgcagagaaaagaaacacttagcatcagactatacacagacaaggacaattatccttgcatctggattgaatcttacaatgtggcaggattcaaatactatgtcaccccgatttctttcaaatggatatacacctatctgacaacaggagaaagtgaggatggaggaattcaaccgacagaactaaatccatatcaggcaggcgaggataacaacttccagctatccatattgaaacaacttattgaatctggcaaacgtgtacagttcgtccctttgtttcgtgaagtcaataattacatcagtgctaccagtgctttcttacgtggaaagatattcttccgagtagaacgtaccgaagaactattgagctacttgcgtgagaaagaagccctaatctaataattattaacccgaagagtgggagctaataactcccctctttctaaaacgaaacaaagatgaatatagcatacattaaaatagagaaaaagcataatggtaaaattcaatatttgacagaagtcttacctcaaatacctaccaatactatcctttataagaagctgacaggacttggagcaacttatggagaactgaaagcaaacagaaattccatcatattggagccaaatgtgccagtcataaaaggcaaatgtaaagaccccaagcatataaatgacaacctttttggagtttatgagaatgtgacggtggaaaaaattgtgaaatatctgcaagcaagtaaggagaagcacatcaaactgttatccactccagaaagtttttccaagattaaatctgcatttgaagaactggatatggatatttattctacctgttacctattgttcgatgagtgccataagatagtaaaagatgtggattatagggaggacataacattacctttcgatgatttcttcatgttcgacaataaaggactggtgtctgccactccgttggatttcacagacccgagattctttaagcagagatttcagattatggaagtacaaccaatgtttgactatgcccagcccatcaatatttatcataccaataatgtgctgcaagaactaaaggagcgattgggaaaagcaaccaacaatcccatcttcctgttcattaattccactgaaacaatctattctatcatgcagaaattagacatactggagcaatcaacagttttttgtgcatccaacagcataacgagtttgaaggacaagaaatttgctaacgcatattcagattgggatgcagacaagatgaagcgattcaattttcttacgagcaggttcttcaatgctttggatatagaactggatttctgcccagaagtgttcattgtaaccgatattactatggcaacccaaagcatggttgacccgtttactgacacgatacagataataggtcgtttcagaaacggaatcgcttctgcaaaccatatcaccaatacagactataatttctctgtaaggtctaaagcgcaggtacaatatatgataggtgtgtttgagcaggtttatggaatgatgaaaacctattacgataatgccacaatagatgaagcaagggatgcttataaagccatattagacattctgccctttaattccatgctgaatagaaacggtgagaaaaactggtttaagatagacaactatattacagaagcaatcgtacaaggctactataacagtttcgatatgctgaccaagacatataggcaatgtaaatcttttaaagtcagttgtgaatcgcaaacctatcctttaggtgatttagaaagattgaaacgagaaaataaatccatcagcattaaagccaagcgtaaagaaatagttgagcaattggaaatgttgaaaggggatgaaaccagcatggcaatggaacataaaagggaacttataagaactgacgctttcattgtagaggcttatgatgaattgggtaaggcaaaaattgaggaactgaaatactcccagtccaaaataagagaagccatgatacttaaaaggtacgatgagaagcggaatggtacagagttcattgaaatggtgaaaaacaggttcaaggcaggacgctcatacgagctgtccgacataagcaaaacaagggatgaactatataagctaatgaatatgccatctgtaaagaagaaacctaaagactttctcgaagatttcttcaaatgcaaggacagttggaagaacaggcaaagggctttattcttggaatatgagaaagtttaatcgggtacaacattttaccaacaaatcaccttttataacccctttcgtaaaaatgttgcatcagtaaaattagaaagtccagatttatatagtctggattttcttccgaaaaagaactcaagtaaacaggttagctaagttctgaatagcataaagtctgattctttaatgtgtggtcttatcattagttccccacctgtgaaattactatctttataacaccacagacagataattccaccgcatagattgacggactacaaactattcagaatataaaaatggaagaatttacctatgaacagataagggctaaggctcttaaacagggagtaaaagataacaaggttcacattggattgtgggctaatcttaataactatctaaagacaaggaaaaagaaaaatggaaaggttactacctattatatctcattgtagaagttggcttattaattcattaatatttaaactgacatgattatccatttgccaacaggaaagaagttccacaatagaaaggaagccaagatacactttgggactgcctactattataagatggaacgagagaagaaagatttagtgtttaccaataatgttcaatcagctactaatgaatatgaagatacctcaaagacacctgcaaagcaggacaagtaacattaggcaggactatgccaccattaataaatcaatagtggataaactcaatccacccaatttgtacaggttcttctgtctgtccttatatagaaatgactattataaggtcagatggagaattaaggatttagccaaacggactggagaggaagaaacagctctaaagaaattcaataaggacatagaagcagtgttggttagaaagagatatagggaagacatcaaccaccctcttattgaatttacaatgagaagtctttactgcatcccaccaatagaccatcccaactttataacactatcctacctctttatgaaagtgaatttggatattaaagtgaaaggctattatatcaagctcctattgatagcagaagataacaagatattgctttcttctaataagttggctgataaattgggaatgggtaagaaaaatatagaaagttacaatctggatttatatggtgctggtctattgaaatatttacctaaagggatagaacttactccaaaggaactactattagacaatgatatagccaaacaacgtaaggagtggaatccaatcaactcaaaaacgtgtttaagataggtttcaagtccaaataacaggcaagtaggatttttcgtactgtttactaatatattaatagatggtacgaataatcccaagtctatcttattatgaatttagaagcatttaaagttggatttctaaggttgggtacaacatttaaggtgaaaaatggattttatagccccaatccccaaaatgttgcacgagataccatacccctattttagcccccctcttgccaagcaaaaagaaaatgagaattggcagatagccacccaccccctcaaccattataaattttactattcacctcacatcattcatggacttcttaaagagatacacaatacagacataatggtaatatagtctaattgtaatatcacttaaaagtaattcagcgaattgtagtgaagttcaaatcgtaatggagcaatccaaagcgatatgggctttgccaatttcagagttaattcaatcaataatcatttaaacaatttatcattatgagaaatttagttatcatgccagcaatggcacagaatcgtgagagaatgaatttgggtgaatatgcagaggaagcaacaattattgtggacgaacctgtaagacctgccaaacatttcattgaagcaaatacacaggaagtaaccttgcagcatctaaagcatgagtgcattacccctgtgttctccaaagacaacgaacttaccattaaccatgctgcatttgtggaaaccatacaggatgcagcacaatcattctttagtggtgagaaagtggaacaggcagacattcgtgtgagccatattatcaaaggcagaatccctgaagctatccataagccagccaaccaactgttggaatctgacaagaccatctattatgaaagggcagctttcagcattgatgttcctaccatctatgaaacggttggaggaaacaagctcaacctttccattgtaggtgtgagggcttataatcagatgaacttatacagcaaaaaagtgccagagttattccgtcttgcaattggctttaaaaaccaagtctgttgcaatatgtgcatctttaccaatggctacaaggacgatttgagagtgagtaatacaagtgaactctatcgtgcagcattggaactgttcaacaactacaatcctgccaaacatctttatctgatgcagcagttgggcaatacttccatgagtgaacaccaatttgcacagattataggcaggatgcgactttaccaatgcttgccaacaggctatcaaaaggcattgccaagaatgttgcttacagatacgcagattaattctgtagccaaagcatacattcacgacaataattttggcggctttggaaatgagcttaatatgtggaagttctacaacttgcttacaggagcgaataagagttcatatattgacagtttcttagaccgttccttaaatgctactgaaatggcaacaggaatcaatgcggctttacatggtgacgagagatataagtggttcattgattaaatgggcttattgattgagagaggaaagggcagctattcagttagttgtcctttctttatttctaccaacctattaaaaacttagaattatgaataaacaaatagataaacttatagagcatatcagagaattggaaacccgtttgggagaagtggataacaaccttagatatataaaggtggtacaagcattgaaacactctttagagaagttggataatatgctaaaagataataccacattacaaagagaataccaagcaatatatctaagctacttctatacaggttgtggattctccttttatgacagggtgtgcaactctattttggattaccaatatgggaacagaccattttaaggaatatcatatataataaggtgtggaatgtctttgtaaggtgttcccaccctaaatattttcactttgggtaaaaataaatgtttccttagtaatcagcgagttagtaaatccaactcagaattaatattcacttctattcatttacttataaaacagaacattatgtcacttaaatattcaagtacaaccgcagactatcttatatggtctgatgcaatgaaccttataaggaaattggcaaaggatgagaattataaaatctcacttcttatagctttgggatgcttcacaggattaagaatatctgatattctatctctaaggtggaagcagatattaggtactgacgagtttacagtaattgagaaaaagacaggcaagataaggactatcagactgaaccttgggttacagcagcatatcaaagagtgctacgggcatataaatcctgttggaatcaatgcaccaattcttataagtcagaaaggcactatcttcacagtccagagaattaacatcattcttaaagaggtgaagaagaagtacaggctaaagattaagaactttagctgccactcacttagaaagacattcggcaagcaggtctataacatgaacagcgataatgcagagttagcattagtaaagctgatggaactgttcaaccatagttctgttgccattactaaaagatacttggggttaaggcaggaagaaatcttacagacttatgactgtttgagcttctgaaaattgggacaggattattaagattcactttatatagtggtctgaatggttctgtcccaaatccatgaaatattgagcttagatacctctaaagtctgattctttgggcttggcatttcagccttataaatgtagttcaattccataagtttgcagactttataactatctcaacttctataaatcatgctggagatagcacttcttgaatatccaacaatatgcagggatgaagtttataaatcaaggtgggtaacaaattggaaaattctgactttataagggaatttttcattttgatacccacatggatttacagagttcaaatgcaattctgactaaatatctcatgcagactatgtttgagggcaggaaatctactatttatcctcacttcatatctaatgatttagaacctttcgttatctttgcaaccaattccaatgaactaatgtgttagagagttggaaggacatatttaacgaaaggtgttattgaaattatcttccgctaacaaattctcgcaaaatttgaaacggtacgaagatgatagcaatagcaccccaccatttgatatatacctaccttatacttataaggctcttagatattgtcaaaattggtgtgggttgctattgttttatccgtaccaaaggcaatgcgagaagccagttagcgagataaagcaaatagtgttcccacacctttttatttacggctcatcatagggagcaagtgagcataacattttaattatgaagcacagattattactgttcttatcaatgctgtttatagccacttatatcaatgcccaaaatgaaattacaggcttcttaggaatcaaattggaagataaaccttatgtagccatagacaagctaaagaaaagataccctaatgtagagtggaagcatccttgcatccatataaaaggcattacattcattgatgccaaattcaataatttagtagtaacctttaagaatgaaaggcttgtagaagctacattcacattattagaagatgcatctgtaacggagaatccttttagggacaaagctatctttctgaatgaagccaaatccaaacagaaccaaattataaataagttcacacagacatttaacagtttaggaaatgcattatgttctaaatatggcaatccaacaatttcttctgagggtaatgcaatatggagagatagaaactctaattctataaccctaaatgtcactcttaataattcacaagatgaaattggagcacatttcagtggtaaattaacagttacatatagaacaacaaccacaaataatgatgaattttaagaactcaataatatataactatgaagattttaagactattagcaacctctctattggttgcattaagcatgggagttagttcctgtggggatgacgcactggatagtgaaccgataacaacacttccaacagaacccagcatctttgagaaaatggataaggcgtttgctgaatatattggtgattactccaatataacctgtagatattatcaagagggagaatcatccattctctttgcaggattgaagaatcaacacctgtggtttgctgaatatgagaagacagaagctaaaggaatcaaacttgaatggattgatatagagaagactgataccattcagcagctatataaaggatatggagaatatgaaaccttatatgtcaaatacgtaacccctttagttcataaagaaacgagtacaggtaatattgtaacattcaatattggaggtagatttcagactatcttcacaagtaaccataagactaaacggactcagttgcaatatgacaatactaaaaatggaatcgcccgtagttggtacaaggaatcagtttttatagctgactgttgttactcccacgaaggagatactatctatatagctaaatcaagacccaactttgacggatatggaaatcctgtcggcatcaccttagtctcttatgaagaaggaattgaacttagtggtcaatacatcaacaaacgtagcttcaaggaaggaaaagttgtgtggggaacttatatacttccaccatttgatatagcttctgatgcaaagagaagctatacgcttcttgacagaactaccaacatttgggcatataaatgtgaagttacattctatgatggtacaaagaaggactttacatttaaaatcaatatagataatggcaaaattgttaataacatcacaggcattacattgaatgagacttctaaagaattggatattcttgatatgttccaactgatagctaccattgagccagccaatgcaaccaatacaaatataatatggagcagttctaatgaagaagtggcaacggttaatcagaaaggattggtaacagccaagtcaataggggaaactacaatcacagcaactacagaggaaggtcattttactgcatcagttactatcactgttaagatgatgcaggaaattagtgcttatattgacacaaaagtagtggctaacggaagtaattcaatgggacagttttggggagtacttgattgtacaataaccaataacagtgcatatccaatcgtactgactaagatagaaatctttagtggagagaaaaccatatttgagaagcactatgacaatcagattataaatcctaagcaaagccatttggagggagcgacaggtttacctgccatttactctccaacagtcaagtggacttatacctataatggaatagaatacacaacatctaaaacttatcaaaaatgaaaacattaagattaattggaatgaccttgctaatggtcatgttagctgtaaactttacagcttgtagcgatgatgaagacgaacccaactctcctattgttggtacatggataggtggagaagttggcttcaactttgaagaaacgctaatctttaacaacaatggaacagggcaatgggatgaagattcattcaattacacaatcaattccaataaggtagtaattgattatggagacggagaccctgaaacatggacttattctatatcttcaaatacgcttaatatgacggcagaagatggtgtagaatatcgttttactaaacagtaatcaaataaatgcaataaaatggaagcagcatttgaggaaactcttatgctgtttcttttattagctactacatttctaaagaatacttcccatatagcccccattcactaaaatgttgcagcagtttataataaacaaaactttatataatcttctatttcttgagcagttaccgcataaatcggtgcaagttgctcaaattgggaatctcttgtaaaacgagagccgttggtgagcatagccaacagatttttggatttcaatttatgtccagagtaggtaagggctaaagataccaaatcgttgataggtacaccagactttaagatggaataaatatcataataatcgcgaaagttactcctgcgtagcatcacctccatcttcatagctccgatagactttacatctgccaatctgagattattcagatattccacaggcatactgacaggagaatatttaggacaggcataaaaagagaactttactccagacactaaatattccacatggtctatatctaaaatgtccttatgctgaatgtcacctattgcagcgagctctttctctatctgataccatgccacttccattttctctgttttagaggtacgccatttcataaagtccaagtcctcactttgtcgagttcccatctgcaatgacaaagctgtgccacctaccaaaagatagggtttgatacagtccaacttagagacagcttcaaaaacttgcagcgtgtgtggagctaaacctttcatgcaaacattttattaaggtggcgggtagccatagactttatataagcatctggcttctttgccttgaaataataccatgcgaagaaacgattcaacgtgtagagatattccgcttggggaacaagataattcagccacacctgcttgattttcttgaaaggataaattagaaacagttggtttatttcttccaagtcaagatgtaacaaggttttctcaatcagcatatcatctggaatatccttgattgagttttcattgtacgaccaaaagcagtgttcttgcttcagtttcgccaatagttcttgttttaccgcatctcttgacataacttcctgttttagaataacacaaaattagtgattattcttgttcaaagcaaatcacaatggagaatgtttcattgtgaataagatttttagtaaatttgcatagtaagttcagtgttgacctattgttgacctcagaacttatacagagataattaacgtgttgataacgaggtagctcagttggttagagcaacagactcataatctggaggtccctggttcaagcccaggctggtccacaaagcataaaacaaaggaaatcaagccgttacaaagagatttgtagcggctttttctttgcacacaaaagttcattgcacacaatttgcacacagcttccgagaagtactgataatcaatgataaacgaaacacaccggtaaattacatcgcatttcatctcgtttctttcttttataactattgccttaccggttgaggtttttcaccgatagtataatacaaataaaagggataagctacacaccgatagttatcccttttattctcaaaatcactttttgataggaggaatgagcccgtattttgcggctatttcaaataagcggtcactgttatatcgatactgccccactatcatagcggaatattcactatcagtttcatcatagtcataattgggataaaaactactaaccttatggaataaagccctaccttcctcatcaaacatattcttaatgatattgccaatagcaatccaatcgttgtaataataagtaatatccacttgacttcatcaatataaagttcgcgttccctttgagcttcctcatgttctttgatattcctttccaaccgctcaaagtaagcgtcaccgagtcctttctcttcaagtgttttatcaaacatatcaatgatttcatctgaaaattcttcttcatcgtcatcttcggtccaatcatccaaagcggcaaatatatcttccccgttatcttctttctcagatgaagaagtatcttcagcctctgcttcattctcgcactcaatatccggccctaacatatcgataagttcgtcaatggtatactctcttttctctggagtattctccgcagcttcttcttgggtaataggctcgtttacgctcgcttcctgttcttgaacaacaacaggcttttcttctactgctttctttttctttggagatttctttttaactcctacaacctcagtagttaaaggttgttcttctttggttcttttcttacgtgtcataactttatttattttgacattaataattttccgagtaattgaatttttggttaatacatatatccacaatattgtcagaatataagggaatagagtattttaactatattattaagccctcgtatcggtaatttagcataaagtaatcccggttatcctaatgagtaggtattaccgggcaaggagaaaaaacagctcatataagctatataggctataaaaacgaggtcaaaaggttggtattcttagttcgctcttctttctcaaagctcgccagatatgcttctgtagttcttaggtcggtataccccaaagactcgcttatatacgagatattgactccgcttcgtttcaatacggttgcgtatgagtgtcttgcggtgtatgtggtaatgttgccgattcccaattcttcaccaatcaacttcatacgcttgtttattcgttttactacatcacgagttatggctttagcttcaattgctgtttcattccctttcatatatggaaatatataattgttaggtagaggcttgttcccccatttatcaatgacagcctgcgtttgtactgaaatagttgctcgtatttcttttctgttttttgttgtgcgttctgttttctgccttacaaaacatatctcaccgtccacaatatccgagaactttagtttcagcatgtctgtcggattgataccgttacacaagtaaatgaatatccagaagtctttatacctattagtcattttatttccgctcttataatcggaaataactttcaactgtttctttgtcaagcctttctttcttccaataccggtctttatctcaaacaaaccttttccaaatgggtattgtgactctttgctaactccggctttctttgcttcattcatcaaagtacgaatatttctcatgtgcataccgattgtagaaacgctttttgtctttgaccaaagtttctcgcatttctgcaaccattcaacggtaatggcactgaacggaatatctttacctccaacttcttcaaccataactaaagtacatttgaaaaattgcattgttccgattctatcttcgcttctcaattcctcaatttttgctcttatgacactatttagagtgtctccggttgcctttcccaaacgtaaattaagcgtattgaaagagaatattcccttttctaccagtgcttcaacattcatccggactaaagaaaaacagctttcaatggcttgtttgatttttctgtattcaaacgatttactgtccggcagcttgttccattcttcttttgtcatacaaatgccaatggaatcatattttggcctcttctgataataacccttgattttaacaggatatttaccctccttgttgattgtacgtgcacccagtaccgtagaaactacgacaccatctttagaataattgaacatgatttttagtaattacatgcaagtggaattgcttgcaataatctatatatctattttttgagggaaatataaacgggtttgaaacgttttgaagccttttgaatagtttagatattttcttcaagaggtttaagtaaagatgcaaattatatgatataatactacactttttatcaaagaaactaaattcttattttcaagaaatagaaaatcaatatcctcttaataattcgtacattaatgatttgaaaaagcgtttataaataaacaatatgtcttttctatcgtttatttaatgtataatacaatactgtataattatcaaatttgataatttataccatgaaatttgttatcacaaaaaataaaattcttatctttgcagaaagataatgaaattgcatgaatatctatacagaagatgaagcattaatagagttgttggaagtgggttgcaccaatgacaaaagatacaaaagacttcctaaggatgttattaaaggttatataaaagcatataatcatttaagggcagccaaacgaatagaagatttatttagaattggaagtttgcattatgaacggttaaaaggagatttaaaggactttgaatcggttagatgtactggacgttggaggctaatatttaaaagttctaccatagacagttcattgataattacagatatagaattaatagaaatatccaaccattatggcgactaaatttaaattaaacgattgtgtaccttgcatagcaattcatccgggagaaatcattaaggatgaattagatgcaagagagatgaagcaaaaagaattagcttcatttatgggtatgcctacttccgtactcaatgatataataaaggggcgtcgtgctataactcctgaagttgctgttttgttacaggaaattttaagtatagacgcttcttattggttatcattacaaaatcaatatgatatagacaaagcaaatatcaatacaaaaataatagaacggaaaagaaatattgagatttggaaaatcatttctcaatattgttctattaaatgttttgagaaattaaatattataggaactaaaatatcagaaaatataaaaactatatattcaatttttggtgttacctctgttgaagaactaataacatcatactctcaagagaaagaagtttcttattttaagaaatctgagcgtttgaaaagtgagcctataaatattttttcatggaaacactatgttttttatgaaagttcgaaaattcagtgtgatacgaagtttagtaacgacaatttaaataatcttattgatgaattaaatcatttatttgttataaataaggatactatagatacaacaaaaaaaattctatcacgatatggaattaaatttatcatagtgcccaaatttgacaaaactcccattgatggattttctttttggcaaggagaaaacccaactattgtattaacattacgattaaacagaattgacaattatgcctttgctttattgcatgaaatatatcatgtttatatgcatcttttcaacaatagagaacaaaaatatatttccatcgaaggagctgaaataaataaatgtgaagaagaagcaaataaattcgccaagtattctttaattagcaaagacttatggagtgcattcttaaaacaacattctatgatttctccacatgcaatgcaaatgaaaataaaacaatttgctcatcaacataatatcaatgaagctattgttttaggattttatcaacacgatattaatttgtactctattaaaagttcaatatcaagagaaataaaatagtccaattatatgtaccgtgcaaatctaattgcacgcaatttgcacgcatcttaagaaaatagaagaaaacaagagagattatttgaaaaggaaatgttatctttaggcttgaaaatcaaggagtatgagcctgaaaagaaatgaagagcaaattgctgaaaatcaattgtttgcgactcataatctggaggtccctggttcaagcccaggctggtccacaaataaaaaaggctgtattccacgaagaatcagccttttttatttgcagactctccaggtataaatccgttgctttagataacattggaatttaatcaaggtagttgttggcttcagaatttacacagagataattaatgtattgataacgaggtagctttacatttgttgctcttgttataggaatcatgaacagaatttctttctcttagtataaaatcatgagcacattatatactctaaaactgcaaatgtgggttttactttaaaaaaacaggatggaaatttgtacgaaatagaaagatgactttatctttgaagaatattaaagctggccggactttttattttgacggaatacagagattgttagtataaaaataaaagattaaatttaggttttatggttaaaagttatgcttgtgcaggcattttattgtttgcgataggattattccccttaatggcacaggacaacactgtggccaaagagatggctataaagatagccgatcgtattgttgcttctacggtttatgagttcaaagatgtaaaaacaggtaaagtatacacttctttggacaatgttgctttaaatccggatatacgtgtcaatagtaaatatttgaattggcattatacaaacggagtaacgaatatggctttgatggagttgggtgataaaatacagaaccggaaatatgaggattatgtgctgaaaaatatgaagtttatttttgacaagactaatcagtcttattttcatcgtctgtatgataaaactttccgtgaaggaggatggagggcggttccccgtcttacttggcatatgatttatagaaacaagcgcttggatgacaacggtcctatgggggctagtctgataactttgaaccagcgtcatccggatgaggctttccaacaatatgttgaaacaacaaatcatcatcttatggtttcggaaccccgcttggccgatggaaccatagctcgcttgtggcctcatgaaaatactgtttgggcagatgatgcgtttatggcggtatcttttatttctagaatgggagaggctaccggtgaaaagaagtattttgatgatgcggccaatcagatattgaattatacaaggtatttatggtgtcctgagaaacagatttattatcattgctatcatacggataataaggagcatggagtggcgcattggtcgcgggccaatggatggatttttatggcgacagccgatttgctggccagaatgccagaagatcaccccatgcgtgatgatgtgataaagaatttccagatgcaggccagtggggtagcccggtatcaagggaaaaacggtttgtggcatcagctattggataaagcagattcttatgaagaaatcaccggtacttccatgtttgtatttggtatagctaaaggtgtgaaggaaggatggctgcatccggatttcatttatgtagcatggcagggattaaaaggtatgttgtcaaagatttcagagaatggtgatgtgacggccatttgtgtcggtacaggtatcatgccttccaccgtattttattataatcgtcctactcaggaaaatgatccgatgggtgaagggcctgtgttacgtgctttggtagaaatgattgatgcacctaaatatacggaaattagtgcgaatgatcagtatgataagataaaataaagatagaaccaagaaaatacaattgccgtaggggcggactggattcgcctggatacacttctttgtggtgccagacggaaacattccgcccctacagtaaacctgatgataatgaaaaatatttttttcagtcttttggctatatcagaactttaaatccaatcgaccctcttttattctttctccctcgaaagtgccactgattattctgttatttaaatcgaaacgggtgatattgattattccatcttccagtttttcttcttgattattttcatttttgaatataacatcagtatagatagtctgatcgtcactcgctccttctgagatactgtaaatagtgatgtctttctctttggggtcaatgatgttgaaagaaatggaagcattgttgtccactcggacatctatgctgactatcgctttctcgtcttcgttgcgggcaggataataagaagccttatcatctgagtcatagcgctgtcccgtatatacccagccatctatcaggcaaccaaaggtattggctcctgtttgagtggcagggggcatgatggtaggatctgctgaaaagtcttctctatcacaggaacagcataatgcgattgttaatactattgtaataagatatttaatcatggcttgaattttttaaaaatgataattgatacctactgagaatcctaattgtgaaatgtcgtccgcccccttcattggatagtgtggctgcacaatccattccttatcatgataacgaacagaatactcgccggaatatgccaggatatagtttatccttgcactgactccccaatgggtgaaagcacggtattctccacctatgccaaagttcgccgcccatttattcatggatactttccgtggcttatcatataccgtactgttatcttgatataactgatatccggttccggtagtaaaatacaagctgaattgctgtttcagccaatgcagggagaactgtggagcaaaataatgtgtttgaattttatcactgctgtttggcatgtcgttagtataccggctgccttgataaagtactccgaatcccacccgtatggcaggcttgtttcctatcagataagtataacttcctgaccagcctatgccattgcgtaaacttgaagagtgtccagctactcctatcagttttccggtgtaaaaggtaggccctgtttggagggacaggatagaacgttcgctagtgccgaattgtgcgtatagcactgatgaatacagcagcatggctgttagtaaaaaacataatttacatttcataatagttgtgtttgtctagttaagcattataaatacaaaaatagtaaatcattgaatataatgatcttattagcctatttattttaaaccgagcatgaaaaatgtgatagattaacgcttatccgaatctgtcttagggtggaaaataactgttatgtaatgatttgacttcttttgctactgaatattatgtaaatataggtaccgaatcgtgaacgaaagttattatttgaacattttcctatggaaatttgttataaaggaaaatatgatatacatttggaaaaagtttcctagggaaataattaaagaagatgatgtaacagagtctggttttaatcataaaaagagaagattatgaaaaaagagtttataagaaggtatggatggacattgcttggcattgtggcaggaatggtaggaggatacttatattggcgttatgtgggttgttccacgggaacttgccctatcacttcttctcctgtcaacagttccatttggggggcggcaatgggaggattattgctcagttcatttataccggaacgtaaagaaataaagaaggaggaataagtatgaataagacaattttattttttctagcccttatgctgattaccactacagcttgcggcagaggaaacagtaataataaccctgtaaaagaagaaactatgacaacagaaggaaatggaaaagtcatacatttgactaaagctgattttttggcgaaagtatataatttcgagaaaaacccgaaagagtggaaatatgaaggtgacaaaccggctattgtggatttctatgctgattggtgtggtccttgcaaaatggtagctcctattctggatgaattggcaaaagaatacgatggacagattgtgatttataaagtggatacagagaaagaacaggaactggcaggcgcattcggtatacggagtattccgtccattctgttcatccccatggaaggaaagccggagatggcacagggagctatgcccaaagcatcttttaaaaaggctattgatgagtttttattgaaaaaataagtaattttgtgcaatagcattcaagaagaagcatcaatatggaaactttatgtaaaataagagacctctatcgcgctattgcagaatttgaaatccggtttgaaaaggtgcatcacctttgtctgaacgaaggaatgttgttatgctgtctctccaagaagaaacgcctgtcttcgggagagattgcagaactgttaggccttactaattcaaatacttctaaagtcatcagatctgtggaagataaaggctatgtagagcgtaatctgggagatagtgacaaacgacagatgtatttctcgcttacggcagaaggaaagaaaattctgaaggagatggaatgctgtaatattgagattcctgagttactgaggtctgttttgtaatagtaaacaagataccgctgtagatgaagcccgtttttatttttatatcattgctgataatgctctgtcccgctttctcgcaaagcaggatggagcattatcttgactccttgggactggtgaatgtaggccggatggacccgacattgaaaatagatttgatgtatacccgtgccgacaattttaccgggaaagtcctttatgaggatttgcaggaggcttatcttcatcccgaggccgccaaggccttattgcaagcgcaaaagcggttgaaagagttgtatccaggttattctttgattatttatgatgccgcccgtcccatgtccgtgcagcagaaaatgtggaatgtggtaaaaggtacttcccaaaatatatatgtatccaatccggctcggggaggaggattgcataactatggtttggcggtagacgtaagtattgcagatgaaaaaggaaatcctttgcctatgggaaccaaggtggatcatttgggcaaggaagcccatatagatactgaggcggcaatggtacagcagggagtcattacagcacaggaacggagaaaccgcttgttgttgcgtcgggtcatgacggatgtgggttataaacctttgcgcagtgaatggtggcattttaacttccgcagtcgtgaagaggcaaaacggaactataaagtaattagataaaggatggaaatatcagcaaaaacactccatttcatcgaagaacataaggaggacgatacgcgtacactggctttgcaaagtaagaaatatcccgatgtagacatggcggcagctgtcacacaaattgccggacggcaggtagcggcccgcaagttgccttcatggcatctggtttccgcattgtggtatcctcctcatttgtctatggagcaatgttcttccgaagcaactgctttgtataaggcctctttgttggaaggcgatacttttgccgatttaaccggaggtttcggcattgattgcagttttatctcccggaatttcaagcaagctgattatgtggagaggcagacggagctctgtgagctggctttgcataatttccctttattggggctggggcatatccggatacataaccgggatggggtggcttatttgcaggaaatgcttccggtagattgcctgtttctagaccctgccagaagagacggacacggtggcaagacggttgccatctctgattgcgagccggatataagtgctttggagtctttgctggttgacaaggcaaagaaggtgatggtgaaattatcgcctatgctggatatgtcattagcattgaacgagctgaaaacagttcgttcggtgcacattgtcgctgtgaataacgagtgtaaggagttattgttgatattgcaaaaagaggccgtttcatcggaaataagcatccattgtgagcatattgcaggcaacggtgagagccagcattacacctttaccttgaagcaggaaaaggcatcggcctgtcccttgactggtcaagtcggaacttatttatatgaaccgaatgttgctatactgaaagccggtgcttttcgttccctcacacaaacctatcctgtgatgaaacttcacctcagcagccatttatatacctctgcttctttggttccggattttccgggacgccgtttccgggttgagtccgtatcgggctttggaaaaaaggaactgaaagtgttcttgatggatatggacaaggcgaatattacgatccgcaactttccattatcggttgcggaacttcgcaaacgtttgaaactgaaagagggaggagatgattatatctttgccactaccttgtccggcgggcagaaagtcttgattagagggaagaagtgttagtttataatcagtttgtaacctattccccttacattcacaatccgtatactgttgtctttggacagtttatggcgtaatttcgtaataaatacatgcaggctgcgtgaattgaagaaactgtcatctccccatagctccaacaagatactttggctgttcaccacttcattccggttctcacacaggcgttttaagatttccgattctcggtgggagagttcttgtatgttccctgcaaaatccagttgttgggtgatggaattgaattgatatcctccgatggtgtaagtattggttatttctttttccacaaaagctttgtgcatcaaggctttgaggcgtacaataagctcctgcatgccgaatggttttttcagatagtcattagctcccagttcaaatccttttactacatcattgatggcagaccgggcggtgaggaataataccggggttgctttatccgattggcggatgcggcgtaccatttcaaaaccatccatacggggcatcatgacatcggccaccaatacgtccggtttctgttcgaaaaactttcttaagccttcttcaccatctccggcggtagtaatgataaaatcctgttcttctagtgtgtccttgataatcatggcaagagtctgttcatcctctactaataaaacgtgtatcttttccatttgcttattcgggaattttaagtgtaaaggtactgccttttcctgtgctgctttccacggaaacagttcctttatgctgttctatcattgtttttacataataaagtcctaatccatatccttttacattatgcagattaccggtcggaacccgataaaacttatcaaacagatgtttttgtctgtcggcaggaatacctattcctttgtcttgtatctttagcatcacataagcgttacggtcactgttacatggactgctgcagcgtgttgcagaaatgcaaatatatgccttttcatcggaatattttatagcattgtctatcagattgctgatcacgttgtacaagtgcaagcgatctgcgcgtaggatcatgtcttctttcataataagtttgaactcagtcggcttatcagctttcaacctatgttggcttatcagattttccaacataggcctcagttcgacaagctcatagtttagacggaaattcttccgttgttccatactcatggaaaggatctgctccaccaatccgctgagctgtttcagctgggcttggataatctgaagatagttctgtcgtttcgtcaggttttctgctccgttgaagttcagtaatgcatcgttggcggcgtaggctacggctatcggagttttcagttcgtgagtaatgttatgtgtgaagtcctctttcatttcttctacgcttttctgccttaagatgatacggataagaaaccagaatgacaaccccaatataataatgataaagaaagaggtataaagtatccctttcatttgttgcaagacgatggtatttgtcggttctacccataaccggtatgccattttgttgtacaagtcataattgtaatagtagctcactgcttctttgcccggtctgtatttttgaggtgaactgagtccttgtacgatcgtgctgtcttgacgtaaattcactatttcgatgcgatgaggcaggtagatgattccgcgcatggcaagtgtccttgtaaaaaggctgtcgaaagtgtgcaggttgatttccgtgaaaaggtccagctggctgtggataccccgttggaagtatttggtgagcagttccagtgtaccgtttttgtcgatagtagtagataccggttcattgatttccagaccaaatcttttttgctgtttgaaaggctcggtttctataactttggtaatcaaagcactgctgtccagattaatactggattcgatatagccatttatggtttcgttgcttcgtttcacggaatcgcaccgttccatcatttcattgtagtcactcacctgtaatgtttctatcaggcaattgtccatatccttcttcatcgaggtatatagtcctgtcaaccaatatgcctgataggcaaagacgcctatcagcgaaaggataatcaatgcggctatggctttaaacggtatcttcatggtgaggcaaaaataggcacaaaataagtattttctttcttttgataacactaaataagacttcgtaagctggtggtaacacatacggaacacttttagcctttactttgcatagaccttaaaaataaaacgacgatgaggacagtgattatcttttgtttatgcttgtttacattcacggtacaggcgcaggacgatgtgaattatacctatatggatagtctttttcagcagctgccggaagtgttggtgaaaggtgaacgtcctgtagtaaaagcagaacggggaaaactgatttacgatttgccccgaatggtagaacggcttccggtgaataacgcctacgaggcggtaaaggaactgcccggcatcgtggaacaagacggtaatctgacattgggcggtcgcggtataacggtggtaataaacggaaaggtcagtacattggataaggaagatctacggacagtactcgaaaatacccctgtcagtcgtttggaaaaagcggaaatcatgtatgctgctccggcccgttaccggattcgtggagccatggtgaatgtgattctaaaatcgaatatcgggcagaaacctgctttgtccggcgaagtggcggctatgtatgaacagtcccgcagggaagacattgcaggccgtggaaatttgctttacacttcccggcgcttttcggcggatgtgatgtattcatacgggttcaaacataccactttcggattggacaaacagtcatggcacactatggcgggggaagtacacgagttggatttgaaaacagaggctaaagggtatggcggccggcataacctccgcttgggggcggattatgatttcgggaagaagaacttgttgagtgtggtttacaatacacaataccgctatggacaggactgtacaaaaatgcgtggaacagcccacagtgataaaacggatgacggcagccgccagttacataatgtgacagccgactatcaatcttctttcggcctttcggcaggaatggatttccttttcttctccagtccgtcacagaccttcttacagaaagatatgcaaagtgtccgtcagacattgaattatgacagcaaccaacgtatcaaccgctggttgttctatgccaatcagcttcattccttgcaaggtggaaccgagatcaattatggtgtaaagtatactaccacacacgataacagctaccagttctatcgggatggtgaaactggagccttgactcccgataattccgagaaactgcttcgaaaagaatatactctgaatatgtacaccggtgcttcacatagttttgggaagaagttttctgccgaagtttccttggccgcagagctttatcatgctgagggacgccatagctggatgctgtatcccactgtaaacacaacttatactccggcagatggtcataccttgcaaatgtccttcaccagtaatcgcaaatatcccgcttactggcagttgcaacctattatacagtatgtggacagctataccgaggcccatggaaatcccgacctgaagccaagttccaattattcgctcgacttgaattatctgtataagaataaatatatgataggggtgaattacaattacacccccgattactttgtgcagcttccttatcaattgcccgaccgtctggcggagatgaatcagtttgtgaattatgattttcagaaaagatggaccatacagactatggcttcttataaagtgggtacatggtggaacgggcgcatttttgctttcggtctgttctctcatgacaagaacagccatttccatgatattgcattcgaccggcataaattcagcgtcatcctgaataccacaaacacattcattttatcgaaaaaaccgaatatcataggtacgttggctggcttttaccaatcacgtgccatacaaggggtgtataacttaagtcctatttgtaatatttcgacttcacttcagtggacttctccggatggaaagacgaaggtgatattgaaaggaaatgatattcttaatacatcgaacatgaccacccggctggcgtgggggcagcaacggaaccggacagaaatgaattgggacaatcgtagctttacattttcattcctctataaattcggcggatacaaagagaagaaacgtaccgatgtcgataccaagcggctggggcgatgatttttttagtggttagtaatcactaaccactaatcactaatttgccatttttgccttgaaagccagcgcatacatacgcatctgttttaccatcgccaacaagccattgctacgggtgggcgacaaatgttctttcaaacctatcttttctataaagtataaatcactgcttaatatttcatcaggagtatgtccgctgactactttaatgagcagggcaatgataccttttacaatcaaggcgtcactttccgcctggaacaccactttgccgccttccatatcggcttgcagccatacgcggctttggcaaccatctatcaggttttgttctgttttatattcgggggcgagtggttcctgctcgttacctaagtctatgagcagttgatacttgtccatccagtcatcaaaatcactgaactcttctatcacttcgtcctgaagttcgtttattgttttcattattttatcatttatttctcattataaatcacatccatcaccgtctgtcctaccgctttcagcgtgttacggtcaatgttctccatcgtatcatttaccgtatgccagaaagagccgaaagaactttgcggattaccggcatcataattaatgatatccacacacgggatgcgggccagtttgttgacatagatatggtcgtctactgtttcgcccccgtcttcctttacaaaatatttgccgtatcccagctcatgtgcctttttccagatcttcttcatctcggaacgggcggtgcgggccgagtaaccttcataatagaacgtggcatcttttccgcctaccatatccagcaagattccatagcgtgcattatagttctgaacatgtggggtacgtgcccagtattgtgaaccaaggcaccaagtgtcttgtttgtatctaccgtcataaaattcaggaattccataatcctccgaatcaaaaaacacgatatctatgcccagagcaggttgttctttctgtatctgacgggcgatttccaataacacacccacaccactggcgccatcatttactcctaaaataggagtgtggtgatttttcgggtcgggatcattgtcggcatacgggcggctgtcccaatgggcgcaaagcaggatgcgttttttactttcgggcttgtaagcgccgataatgttgcgtgatttcagtatagtaccatcataagctatcaaatcagcatattgattgtataccttggctccgaatttttccaattgtcctgccagatattccccacattctttgtgtgcctgcgtgttagggacacggggaccgaaatcagcttgtacctgaatgtactggtaggcgctgtccgcattgaattcgggagccttgatcacttctttgtctacggtttctgtccggtcgtttctgcttttactgtttccacaggctacagccgtcaatacaagcagcaagaccgggattactaaaacgttttttatcttcatacttattccttgttatttgtgcattgtccttatcaagatagagagtctgcgccgcaaagttacgttattttctttgtacttcttccataacgcgcaggaagtttcctccccagatcaggcggatactttctccactatatctttccaacagcagccggcgtgtaaagtttatcaattctgatgccgaagcgcagcctgtgataccgccgtcaccgtcaaaatcggttcctatccctacatgttctatgcccatgacatttaccatgtggttcagatgctcgatggcatccttgatggtagcttctccgttcttacgaaggaatccgccatacatacatacctgtgccacaccccctttggctgccaatgctttcaattggtcatccgtcagattgcgcggatggtcgcaaagggcacgggccgaagagtgagaggccacgatcggtttgctgctgatttccagtgcatcgtagaaacttttctctccggcatgagaaatatctaccatcattcccacacggttcatttcttttatcacctgttcgccgaatgtgcttatgcccagtccttcctcattataacgggcggagccgcagatatcattatttccgttgtggcaaagtgttatgtacaccacgccacgatgtcggaaacgttctacattcgtgatatccttgccaatggcatatccgttttcaatgcccagcatgacagcctttttccctgcttttttcaaacgggacagatcagcgggagtatatgctatatctacggctgtgcagtttttggcaaccatctcctctatttcgttcaggatgcggtctgctttggcagtagcggccgataaggcttcatcggtacgttccaattgcttcaggtaagccaccatgatggttgcgtccagatgtccttccgtcatcttatgcaggtctaccaggattttcttgtcacgggtggcaaaatttattccttgatcgaagaacatgggagtgtcgcaatgtgaatccagcgttatcatgcgtctgtgaagtcttttggcttctctgaaagaagaagattcccttataaaccactcgaatagtggcatcatgcatgtgttgttttccaatatgaaacattccggatgccattgcactcccatcattgacttgcattcggtagactccatcgcttcaatgactccgtcggatgaacgggcggttaccctgaaacccggcgcaacctcttttaccgcctggtggtgaaacgaattgaccggcaaaacttctgtttcaaacaatttgtaaagtaaggaatctttctctatccgaaccgtatgcgaggcatacccccgtcccaaatcctgatcgtgtttgatccgtttcccttccatttgtacatgaatatcctgatacaggctgcctccaaaagcggcgttcattacctgtatgccgcggcatatccctaaaatcggtatctgccggtctgcggccagtttggcaagcaataactcctgacgatccctccgaggattgatactgtgtaattcctttaccggctcttctccaaggaacaaagggttgatatccgcacctccggtcagcagtaagccatccaatgcattcaatgagtttatcaaactgtcagtgtcgtcaactggagggatgatgaaaggaatccctcctgctttcagaatggaagtgaaatatccttccagtaaagtacaggctccctcctggaagtttccggtaagtccgataacaggagcgtccttgtggcatggaaatgtgcggtgtatggcatcgtactcggctgaaatgtcaaatgtttgaaacgttttcataagttaaattattcatagaaactgagcaaagatagggataaattcagatttatttttcatatttgctaaaaatctaatgaccatggaaccgatacaggacttcgccagcttgataagccgtttacgctcgttgaaagaacggaaacgggttgtggttgtttgccctaatgaccctcataccgaatacgttataacccgtagtttgcacgaaggctttgccgatttcttattggtagcggatacgccccatttattgaattcggaatatatccggatgcaatatccggaccatgtgaaagtatacgaggcgacaagtcccgacaaagcggcgcaggaagctgtttcgctgatacgtgagggacatgcggacgtgttgatgaaagggattatcaatacggataatttattgcgggccgtgcttaataaggaacatggtatcctgccgaaagggaatgtgttgagtcatatcacggtagcacagattcctacatacaagaaacttttattcttctcggatgcagcggtcattccccgtcccaccttggaacaatttgaggcgatgttgctgtatgatctggaggtgtgccggcgcatggggatagaagctcctcgggtagccttgattcattgtacggaaaaagtgaacgagaaatttccccatacgctggactatgtgaccttaaaggagcgtgcggctgccggtgcttacggaaacatgtacttggatggtcccatggatgtgaagacggcatgtgatgcgcatagcggtgaggtgaagggaatcagttctcctgtggtgggacatgcggatctgcttatctttcccaatattgagtcgggaaatacattctataaaacggtgtcgttgtttggtgacgccaacatggcaggtatgttgcgaggtactacttctcctgtagtggttccttcgcgtgccgattccggtaattcgaaatattatagtctggcattggcctgcgtggccggataaaacctttaaattatgaagatatttgtgattaatccgggctctacttctaccaaaatagcccttttcatcgatgaaaagccggtatgggtggcaggggcccatcatactgcggatgacttgtcggagtttcaccacgtcaacgaacagtatgagtaccgtaagaattttatactgcgactgcttgccgaggcggatattccgttggattttgatgccgtcattgcccgtggcggtttgttgaagcctacgcccggcggggtgtatgtcattaacgaacagatgaaacatgatttgctgaacgcccggatggagcacgcttgtaacctgggagcgttgattgccgatgaaattgcccgggaatgtcattgtcccgcctatattgccgatcccgaagtggtagacgagctgcaaccggtagcccgtttgacgggaataccggagatagagcgcatttccatcttccatgccttgaacagtaaggcggtatcgcgtaaatatgccgtttccatcgggaaacattatgaagatttgaatctgattgtggtgcatctgggaggtggcatatcggtgggcgcccactgcaaaggccgggtgattgatgtcaacaatgccttgaacggtgaaggcccgttttcgcccgagcgtgccggaacgattcctgccgaccagtttgcagagctgtgtttcagcggcaaatacactttgaaacaggttaaaaagatgctgaatggcaaaggggggctgacggctcatctgggtatgaatgatgtggtgactatcgcccggaaagcttccgaaggcgaggagctttataaaggggtattggatgcgatgctctatacggtggccaaacaggtaggggccatgtatgtcactctccgtgggcaggtggatgccattattctgacgggaggcattgctcatagtgattactgtgtagggattctcaaggaacagattgattatctggggccggttgtgttgatgcccggtgaagacgagatgggttcgctggcttataatgcgttgggagctttgaaaggtgaactgcctttgcaggtttaccggccggaataagaagatggtggtacatcggaattaaaataagcgataaaattgttcaaatccctcatggaagggtaatgtattgatatacagaagactattatgaaggaattattataaattccttcataatagcttcagggatgtttttacccggccagtgctaccagtttatacatatttcctgttgtggtatgcatccgttccgctcccagggaattcatgattcttcccattttgtttatcgtgatgccgcgcatggctgccggatatcgtttcagtaggatattgaacaagcatactgccgagtaaagtttgaagtcttctcctttctccggcagtctgaaacaatggagaatcatttccgcttcggtgggcaaggcataataggcctggttgcgcagtttcagttcggattcctccgccgccgagaaccagtaacgctttccctcgtccagttctgctttcagttgggcgaaaagctgtttgtgctccagtggcgagcagtctatcttttcttttacctcggcaaagaaataacggcggcttccgctggggtcggtgagcagcgctttccggttgctggtgccgatgaacgaggccatccggggcagatggctgtaggacgagcggtgcgacttgcggaaatccagttttttcatctgcatcagatttttcagtaatggcagtttctgtggtgaaagacggtcgtactcatccagattaatcagtccgaagaaagccagcttctgctcacatcctgcctgtccggtcagttcgaagctgtccgtatagtagtctttcaacgaatcgggcatcagcaattcgcagaaagtggatttgcatcttccttgttcgctgctcaccagcatgggagctacggcgttggcacaccgcgccatgtgtccgctccactgggcagtgacacccagcatccagcggtggaaactgtttacccagaaatctttcgtagagatgcgttgtgccagcggagtcacgcggtccatgccgtcccattcgggaagggtgttcatataggaaagtaacggatgatagtccggcatctgctccgagttcacgaaccggcttacatccttgtcccagcagttgatgtgacgtgcacgggcttccagacacaggctgttcagggtgcgctggcttattaccttatatataggtgtgtcagcgtcttttttgcaacattccgtttgttccgtcagtacgttgaagcggaagtggtagcggctcagcaaatattgttccagtttttgctgtatttgctccatttccggtttcttctgcattgataatgagggagatgaactcttcactgtcggacttgtcactacattcgaggaagcaagcttcttcattactttgtttaataactttttatccattatttgttgttttaggtttccgttagaacaaagatactgtgtaaaatagcgttttgcaagtgtttttcgtggggttttagagaaaagtgactaagcgtaaacatcctgaataacaagctgtttcgtccggttgattacacgatatcttccttttgattcagttgtttcacttaagtgatgaagtttgagcaatctagtgatgaaagttcatcactaaggtgatataatatcatcacttaagtgaaacaatttacttgaagggaagatacaacgacttcgaccggatgatacaccttattcgtccggttgttgtcatttgatgaaatgtgagtattttgccggacagtcatcacctcgggatgcgtttttggagatggaacggggctgaaagaatatgaagttattatgaagaaatcgtagaaggatcattcataataacttgcttgtaatcagtaggtaatgtgctgatgaagggtttgacggaaataattccggtattacattttctatgccggcgagtgtgttctcggttacagagatggaaacaggagttatttgaacagaccggtgggcaagagatttttcatcaggctccggtctgataatagaatggtatctcatgatgaaataagtaaattatggggaaggagcgataatggaaaatcatagcctttataatttgattgcaaaaatggggaaggtcttatcagtggatactcgcattgaattagttaccgtagggaaggacggttatgctctgaaaatagaggatgttgcgagctgcatatgagtaagcgtttccgcgattctataagtgtggtaaaataaaaagtttaattagccttgtttagctattttccttttcccatttatcaggaagtagttccctgtatttttcaaggggtgtgttcggttgcattctgcggttctattgaaggtgattgtgatcccggaaaggctgaactcttcttccgacaacatgatgggtactatttgagtgaacgaaggagaggaggttgtcgttcgggagtgggcaacaccattataataatcacgaaccacatctttcctagcttgtttaaagctatagccccgtcgggacatccaggagctcatatcccccaaagtggtatgttgcttgcggcaaacatcggctaaagaacaattgtggtctactttcaatacttccagaaaacgtttccaagtggctctaaatctactttcttctaaatccataatacttcgtttttatacgctgcaaagatacaagaacgaaaaaagacagactaggtagaatcgcggagacgcttacaacatattaaaattaaagacttttcgataattatttgcgcaaataactatcacttgttgtctgtatgctttccgcacgttttacctttactttcttgccaaagtcaaacttatatataaggtttaagcacgctccttgataaggggttttattattttcttctattctgcttagattgttattggtaattgtggtcaggtttcttcttttattcaaaatagcgtaaactgataaatttatgcagaacttttgatccaggaaatatttgtaaaggccggcattcatattgtatacactgtgatatattgtttcgcttctacgtgctcttctttctgccataaagttaaaacttccaccgaaagtatttgtgaaacgaagactgttgtcacaaaagaataagcaatggactatatggtaggtctgtttgggcgacacttctttagtgtagtcgccatcaagggaggcattggtagtccaccagctgaacaaggccttagtgaaacctattgaaaaagcatgtcgataagacttccctatattggtcggcatagtataggtgatgatcggattgtctttatcttgatagatcaggggaaataaatcatctttgcactttgcgtaagcgtagcttatactccaagtatttgacagactcaacaatagcctgatacgatgttcggtagtaggtactaaatccggattccctttagcataagaatattcagagatatagacaatagccggattcatgctcttataagggatatttcccattctttttgaataggataaagaggcttggttcttttcagagaaaaggtaacccaccttgatggaggggaacagattgcgatatgtgcgtttgtcacctgctatgttattggaaatacatttcacttcatcttcttgtacccgtataccgccatttaatgtaaatttcttccattgccatacatattctgcatagcctgcataacctatacctttataggtaaatagcccgcttttatcttctttctgccatccttcttcactctgatatgcgtaatacatttggttgccggtgtggttattataatagtcgccaccccatttcaacctggaatgtttgttgagcaagaagatataatttatctctgctttccataaatcagaaacagttccggtgttgctacatttattatcctcttcgtttttctccggatactgataaagataatggtgattcagttctttcgtttcgtcacttctcaaataatcaagaactgttcgcaaagtatgctttccgttttttgatttccaattatagttcaaactagcctgatatattttgtcatcccctttccctttactatggtaggaagaggtatattccttttctgtttcttgtatttcggaaaaagaagaagattttagtgtgcttccagcttgttttaccatacagttaagtccgatgctttgcagggtagttatatcatataacatactgaatgtttcattgattcttcttatatttttacggtctatattctggtttacaatatgggtattctggtggctgttatgggttatattttccgtgatataaggatctcctgcattagaaagaactagattgttgtaaaaattccatttcccaagccgaaggcttaatggaagacccaagcgttcccaatgactatttctttttctcatttctcctagcaaagagggtgaaccattgcctccgccatctgcattttttttcaaagatatatatgattcctcctttagtcgtggcattatattgtaaatcagcttccggcaggatttcaacattttctatgtccgtggcttgcagacttgataattctgtgcggtcatgaagttctctgccgtttatgtatattttagacacggttcctccattcagccttagttcaattatatgcaaggaaagaatttcaaatataggaataagaagagtttgcagagtacggagcaggggataaagttgtgaaataatttttgttttatatgttgcaggcacgggatgcgtatgatattagaatcgcggaaacgtttacgaagagcgcatgaggaatgcgcgaaacttgagagtgtcatctgatgtcatagtacaggctacagggctttctgaagaagaaataaaagccctttaattgaattgcaaagggtttggccggaaagaatagtttctattcatattcgtgtttccgtttcggattcatcggaaaccaacctttcagcacacgttcgcgttgctcgaagatctccttgatagtccagaaagaagagaaagagaagacacccaataaagaggaaatcaagatgtcactgataagtacagtccctataatgcctgctatgcccagtaccaaaaatatccaccagcatcgtgtaccccaataatattcggccttgaccacgatggggtggaaaagaccgattattaaaaaggtacaaatgccgatggcgataccgcctaaatggtattcattcagccattccattctttcttagctttgaatgggtatttcttttttgatgctctgttccagagagatcaaggtctcggtagccgtaacaccgggaatttcctgaatctttgagttcagcaagtccatcaaatgttcgttgtcacgagagtaaagtttggtcagcatagtatatggacctgtagtgaaatggcattccacaatttcgggaatcttcttcagttctgccactacgtttttgtacatggaacctttttccagcttgattcctacgtatgtacaggttctataccctaaactcttagggttcacatgatatcctgaaccgataataactcccaaatcaattaatctttgcacacgctgatgaatggctgcgcgtgaaactccacattctgctgcgacatctttaaacgggatgcgggcattttgggatataatttctagaatttgtctgtcgagactatcaattttctccataatataccgattttaatgttatcaatctgtaagcaaatataggaatactttttaatttatctactattttgcaagaaaaaacaggatttctttgaaaaaaagtgcaagaagaggagctaatcacctattttcttctctatttcgccgattttccctcttctttcaaatgagaaggtatcgctatgtgtatctaaatagttcaacaggaatagcgattttcttaacaaatatttttgttcttcggactctttcaacaaagcatcctgatagagcagttcggataacatgtcgatgcgcgtgagcaattcctcgccaccatagttttgtcccatttcgttcagtatatattccgcatcctgatcataatagaaggtggaaggatgattgaagtaggcacgataaatgctttgaagttgcaattgcagctcgggaccgtcctttttatctctttcttctaccaacttttccaatgcttcgaaaaactgttgaagcaaccgcataatgtaatctctttgcagcatgttaattgtcctcttcgtttttatgggttagtgttactaatactttatctatccgggctccgtccatgtcgactatttccagtgtgaagtcattccattccatggcttcaccggtcttgggaatgtgacctagttgttgcaagatgaggccgctcaaagtgttgtaattataatcggggtataaatcctccatttcgaaatgactcagaaagtcatagaaagagcattgcccgtctatcagccagcttccgtccttgcggggaacgatatcgggatcttccgagtcactgggcaaggtgcctaccagggcttccagaatgtccttcatggtgatgatgccttgcagactgccgaattcatcacagattaatccgtatttgatgttgtgctggcgtatttgttccaatactttatatacatccatgttttcgtggaagtattgtgccggacggatcacatcacgcagattgaattcgcaactgttcagcttcccgaagaggtctttcaggtaaactactccgatgatgttgtccagggtgtttccttgagttacagggtaaacttggtacaggtgttggcatacgatgtcatacagttgcttgttgttcatgtctatgtcaatggatacgatgtcgctgcgataggtcatgatggtgttgatgctacggtcgcccagggagaagacgcggtccacaatatcctgttccacttcttgcacttcgccgttctcagtcccttcgtctatcatggatttgatttcctcttcagtcactttttcttcagctgtgttgatatgcagcaggttgaagataagtgaagtgcttttggcaagtatccatacaaaaggagaggctatgacggacagccagtacatgggacgtgccaatagcttggcagcacgggtggaggcactcatgccaatgcgtttgggcaccagctcgccaaagataatagtgaggtaagtgaccagaatgacaatcagggtttgagccaataaataggcatatgtggcgggtacgccggcgtcagtcagtatgttcccaaaatcggtggccagcacgtcgccggagtaaataccggtcaatataccaatcagggtgattccgatttggatggtggataaaaacttgtccgggtcattggcaagctttaaagcgatacgcgctgtagagcttccatgacggatatcattggacaaactacttttacgcgctgagatcagggcgatttcggacatagcgaataccccgtttaataagataagtgcgataataatggcaatttccatgtaagaatttacgttttgttttgctaacaaatgtactaagaattgtgttttctctttcttcttttagatttaattaatgaattatctgtcatttgcgctatctttgcggtgtctatgcttagaaaggagtaattatgcatccgttggaactattcaaatattgtccgaagtgtggttcgccgcactttgaagtgaacaatgagaaatcaaagcgttgcgccgattgtggctttgtgtattatttcaattccagtgccgctactgtagcttttatcttgaatgataagaatgagttgttggtgtgccgcagaggaaaagaaccggcaaagggaacattggacctgtccggtgggtttattgatatgtatgaaaccggcgaggaaggtgtggcacgcgaggtgctggaggaaaccggcttgcaggtggaggaggctgtttatcagttctcattgcccaacacttatctttattcaggatttctggtacatacattggatcagttctttctttgtaaagtgaaagataccagtcggataaaggcgatggatgatgtggcggaatctttctggcttccgttggatgaagtgaatcccgaagaattcgggctggattctgtgcgtgaaggagtccggcgttttttgaaagaacataaactttaatgataagatatgaaaagaaaaaccttattgatggccgcattgatgggaggctgttccttgcagggaatggcgcagcagataactcccaaggatgtggcaggtgacaaggaatataaccgggtatgccgggaatatgagttgaaaggcggggacagcatggaactgttacaggcttatctggacaaatatcctgactcccgtcataaaaacagggtgctgtcactgattgcctctgcttattttatggagggaaaatacaaggaggccattgccctgttccggtcgtgtgatctggaggctttgcctgataaggaaagagatgattgtgccatgcgtctggccacctcttatctgaaagaagataatctgcgtgaagcggctgtatggtttaccttgctgaaagaggtaagcccattgtatcaggatgacgctgtctataatctggcttatattgattatgtggagaaacgctatgacaaggcgctgaaaagtttccagtctttgcagaatgatgccgtatatgcagcattggttccttattatataggagagatttatttggtgaaaggaaattatcagcaggcccgtactgtggcaaaagcgtatctggagcaatatccagctaaaaaggatgttcctcagatggaacggatttggggagaggcttgtttcggattgaatgattaccaagcggcgatacctcctttggaaagataccgtgaaagtgtctcccacccgcagcgtaagcctttgtatgaactcggtatgagttattattatactggtgtttattccaaggctgccgctactttgggggaaatggcttcggtacatgatgccttgtcacagaatgcttatctccacatggggctggcttatttgaacttgaaggagaggaacagggcacgcatggcattcgagcaggcagccaatttcagttttgacccgaaagtaaaggaacaggctctttataattatgctttgtgtattcatgaaacctcttattctccatttgccgagtcggttaccgtgtttgagcgttttctgaacgagttcccgaactcgccttatacggagcgtgtcaatgattatttgatagaagtgtatatgaatacccgcagttatgaagctgctttaaaatctatagcaaagattgaacatccgggcacacgtattatggaggccaagcagaagattttgttccggctgggcacacaagcgtttgcgaatgctcgtttccaggaggctctggagttcttcaaccaatcgcttgctgtggggcaatacaatcaggcgacaaaggcggacgcttatttctggagaggggaatccaattatcgtttggaccgttttccgcaggcgggtaacgattaccgcttgtatctggaatttgccaccagcaaggacggacaggaatacggtctggctctctataacttgggatatacttatttcaaacagaaaaattatggaaatgcgggcacttggtttacccgttttgtggacaggggaagtgccaatgaacgtgccatgcaggcagatgcctataaccgtataggtgactgtaacttctatgaccgccgttttgaacaggctcgtcaggattatgcccgtgcggtggagattgatccgtcactgggggattactctttgtatcaggaggcgtttgtacgtggtttgcaacgtgattataatggaaaagtgcagacgttgaaccgcttgatttcggattatccggaatcacaatacatggatgatgccctttacgagcagggacgtgcttttgtgcagatggaagataatgccaatgccattgcccgtttcaatattttggtgaagaaattcccggagagcaatgtcgcacggcgggcagctaacgagatcggtttgctgtactatcaggatgacaagtatcctgaagccattcaggcttataagcaggtcatagccagttatccgggcagtgaggaggctcgtttggcgcagcgtgatttgaaatctatctatattgatttgaacaaggtggatgagtatgccaactttgcttcaactatccccggcggtgccaactttgatgtaaatgagcgtgattcattgacttatgtggctgccgaaagggtatatatgcgaggagaggtcaccgaagcccgcaacagctttacccgttatttacagactttccccgaaggtgctttcagcctgaatgccaactattatatcggtttgatagactataaccagaaagcctatgaaagtgcagctcggcatttggataaagtattggaatatcccaacaacaaatattctgaagatgccatgttgatgggtgccgaaatggcttatacggcgaaggattatgaaaaagctttgcatatttacaagcaattgaaagataaagctgcttctatggagcgtcgccagcttgcaaaaaccggaatgttacgcagtgcgcatatgctgggaaatgaggaagagattatctttaccgcaacagatttgctggccgatactaaactggcgccggaattgtctaacgaggcacattattaccgtgcaaaagcttatttggatgccggcaagacggatggagctatggaagatctgaagatcttggcaaaagacacccgtaatgtatatggagcggaggccaaatataaagtcgcccagatttactttgacggcggacaaacggataaggcggagcaggaggtgctgaattacatcgaggtaagtacaccgcatacctattggctggcacgcagctttgtgttattggctgatgtgtatatgaagttgggacgtaacttggatgctaaacaatatttgctttcattgaagcagaactatcaggctgatgatgatattgccggaatgattgaaagcagacttgagaaattgaaaactgagaattaaaaattaaaaaataagtgctgaatatgataagtaagaaattgtcaattgtccattgtcaattgtccattatattggcttttttgcctctgtctgttgcatatgcgcagcaagatagtacgttgaaccgcactgtggtggtagagaatgagtataatcccaatatcatggatgcctcaaagattaatgtcctgcctaaggtggaggagccggctgtaatgaagaaaggcatagaatatgctacagccttgcgccctgttttggcctggacgtatgaaagtatgtctcctataacccgtgaatgggctatgaaccgcgcgaaacgtgggtatgtccgtgccggatatggaaattatgggaatgtggattttaaggctgggtatctgtgggatatcaccggaaaggaccgcctgaaagtcggagtatctctggatggcatgaacggaaagctgaagcattggaatgctgaggattggaaatcacgtttttattctactgagttccgtttggactattctcatgatttcagcaaggtaactttgaatttaggtggcggcctgcaatcacaagtgtttaactatatgcctgattccgaagtacatacggcttctgccagagctgctgataaacagcatcatactttaggcgattttcacatcggtgtttcttccagagatgaatcgcttcctttgcaattcactttgcagaccggattgaagtattttggtatcaaatatccgctggattattcagataatgcatctacaggtaaggagaagattgtacacaccgaaggagatgtatggggcaagctggataatgagcaacgggtaggcatccgtttcgagatggataatctgttttattcttcggacagtttaatgggcaactatacttcactgggtttgaatccttattatatgttggaaagtgatgactggcgggtccgtgtcggtgctcatgtggattggcagtcgggggaggacagtggcattgatgtgtctcctgacgtgaaagccgaatacttgttctcggatagttatgtgctttatttacatgcgttgggagggcgtgaactgaatgattatcgccggttgaatgctttttcaccttattggtctttaaacgcccggatgccttctacctatgtgccactgaatgctacattgggttttaaagcatctccggtaaatggtttgtggtttaatatctttggtggatatcggatcagtaaagatgagttattttgcaatctggtggatgcggacgggtattattttactcatttcttgcaggataaagcaaaaaccgcatatggaggtgctgaactgaaatatggttataaggactggtttgacgcttcattgaaaggtacattttatagctggaagacagacaatgaaaatgaagagctgtatttaatgaccaagcctaagtttgaattgaatttttatgctgaggctaaggtttttgaaggattgaaggtttatttgggctatgaatatgtacagaggaaagagtatgtaatagaagaagggaatagcagcagggattttggtttgggcaatatcagcaatttgagtgtgggagccagttataccttcctgaaagacttgtctgtttttgggcgtgtgaataatctgttgaataaacaatattattatgagtacggctatcctgctgaaaaactgaatgttctagccgggctttctctggttttttagttaaatagacattcggaaaggacttttttaagaaaaaaaagcagaaacataccttattatataggtgtgcttctgctttttttctacttttgccccaaaataaaatggaatacatagtattatgcaaaaaaatctagtaatagttgagtcacccgctaaggctaaaaccattgagaaattcttgggtaatgattataaagtcctttccagttacgggcatatccgggatttgaaaaagaaggagtttagtatcgatgtagagaatgggtttgagccgacttacgagataccggcagacaaaaagaaattggtagccgaattgaaagcggaggcaaagaaagctgatatggtatggcttgcatccgatgaggatcgtgaaggagaagctatttcatggcacttgtttgaagtcttggggctggaccctgagaagaccaagcgcattgtattccacgagataaccaaaacagcgatactaaaggccatcgaaaatccgcgtgacattgatgtaaatctggtaaatgcccagcaagcacgccgtattctggatagaattgtaggttttgaactttcaccggtattgtggaagaaggtaaagcctgctctttctgccggacgtgtgcaatctgttgccgttcgtttgattgtggaacgtgaacgtgaggtacatgcttttgtcagtgaaccgtcttatcgcgttacagcagtgtttgaagttcctgatgttgatggaaatgaagttgaagtgaaagcagaattgtccaaccgtttcaaaaccaaggaggaagcacaggctttccttgaaacttgtaaggatgcgcagttctctattgaagatataataacccgccctgtgaagaaatcgcctgctgcaccgtttactacttctacgttgcagcaggaagctgcccgtaagttgggatttacagtagcgcagaccatgatggtggcacagcgtctgtatgaaaacggacaaattacttatatgcgtacggattcggtgaacctttcggatttggctttgaatactagcaagcagactattttgtccctgatgggagaaagatatgtcaaagtccgtaagtttgccaccaagactaaaggagcacaggaagcgcatgaggctatccgtcctacctatatggagaatgagacggtgagcggaaccggtcaggaacagaaattgtatgaactgatctggaaacgtaccatcgcttcacagatggcagatgcggaactggagaaaacaacggctactattgtaattagcaacagcagcgagaaatttatcgctaccggcgaggtgattacttttgacggtttcctgcgtgtatataaggaatcatatgatgatgacaatgagcaggaggatgagggtcgtctgttgccgcctctaagcaaaggggaaaaactgataagaaaagaaattttggcaactcaacgctttacccaatgtccgccccgttatacggaagccagcctggtacgcaaactggaagagttgggcatcggtcgtccatctacatacgcacctaccatttctactgtgcaacaacgcggttatgtagaaaaaggaaacagtgaaggtgtgaaacgtccgtatgataccttgaaactgaaaggcggcaagattacggaaattaccaagacagagattacgggaaatgaaaaggccaagttgttacctactgataccggtatcgtggtaaacgatttcctgatggaatacttccctgaaatcatggactttaactttacagcgaatgtggagaaagagttcgatgaagtggctgaaggagaaaaggaatggactggtatgatggacagtttctataaaggtttccatccgttggtagataagaccattcactctaagactgagcataaggtgggtgaaagagtattggggacagatcctgtaagcggtaagccggtatcggttaagataggtcgtttcggtccggttattcagattggtactgccgatgatgaagagaaaccgcgttttgcgcagttggcaaagggattgtctatggaaaccattacgttggaagaagcgttggatgcgttcaagcttccccgtacgttgggggattatgacggtcacacggtgacggtaggagtagggcgtttcggaccatacgtgcgctatgacaaactgtttgtttctattcctaaaggaacggacccgatggagatttctttggatgaagcggtcgaactgatcaagaataagatagaagcgcaggagaagaagtttattaaagtattcgatgctgaccctgatatgcaggtcttgaacggacgttacggcccatacatcagctatcagaaaaagaattataagatccctgagaatgtagaaccggcggatttaagtctggaggcttgttttaaggtgattgaattgcagaaaagcaaggcggaaacccgtaaaacgaaagcggcttcaagaaacaggggaaccgtaaatatggaagaggagtccgaaaaaaccgaagaatccgctaaaagtaaggcggttcccaaggtaaagggcactgcaaaagcaaaaaaatgacacgtatatttctaataggatatatgggtgcgggcaaaacgactctaggtaaagcgtttgcccgtgaaatgagtctgaatttcattgatttggactggtatatcgaggaacgtttccataaaaccgttcaacagttgttcttggagcgtggagaagacggattccgggaactggaacggaaaatgttgcatgaggtggccgaatttgaagatgtggttgtttcggccggtggaggaacaccttgtttttttgataacatggagtatatgaatgactgtggtgatacggtatttctggatgtggaacctgctgtgttgtttcgccgtctgagagtggccaagcagcaacgtccattgttagcaaataaaagtgatgaggaactgatggattttatctgtgaggcgttacagaaaagacatccgttttattccaaggcaaaacatctgtttaaagctgatgagctggaggataaaaaacaaattcaagcctctgttgacagcttgagaaagcaattgaataaataattatatatagtaaatacacactctttgtacagaagaagaaatgagaaaatggcgtattgaagattcggaagaactctacaacataaccgggtggggaacttcgtactttggtatcaatgacaaaggtcatgtagtggtaactcctcgtaaggacggcgttgaggtcgacttgaaagagttggtcgatgagttgcaattgcgggatgtggcagctcctatgctggtccgttttccggatattctggataatcgtattgaaaaaatcgcgaactgctttaagcaggcatctgatgagtatgggtataaggcccagaattttatcatttatcctatcaaggtaaaccagatgcgtcctgtagtagaagaaatcattagtcatggtaagaaattcaatttgggactggaagccggttctaaacccgaactccatgcggtgatagctgtgaatacagattcggattcattgattatctgtaacggatataaggacgaaagttatattgagttggctctgctggcacagaagatggggaaacgcatttttctggtggtggagaaaatgaatgaattacgcctgatagccaaaatggcaaagcagctgaatgtgcggcctaacataggtatccgcatcaagctggcttcttcgggaagtggtaaatgggaagatagcggaggagacgccagtaagtttggcttgacatccagtgaattgctggaagcgcttgactttttggaaaagaaagacatgaaggactgtttgaaactgattcattttcatatcggcagtcaggttactaaaatacgtcgtatcaagactgctctgcgtgaggcatcgcaattctatgtgcagttgcatgtgatgggatttaatgtggaatttgtggatatcggtggtggtttgggggtggattatgacggaactcgttctgccaatagtgaaagtagtgtgaattactctattcaggagtatgtgaatgactctatctctacgctggtagatgccagtgacaagaatggaattcctcatccgaatattattactgaaagcggacgttcactgactgcccatcactccgtgctgattttcgaggtgctggaaacggcgactttgcccgaaatggatgaggatttcgaagtaggtgaaaatgaccatgaattggtacatgaactttatgagatatgggataatctgaatcagagccgtatggtggaggcgtggcacgatgcacagcagatacgtgaggaagcacttgatttattcagccacggtattgtggatttgaagacccgtgcccagatagagcgtttgtactggtcggtgacccgtgagatcaatcagattgcttcggggttgaaacatgcgcccgatgaattccgcaaactggacaaactgctggctgataaatatttctgtaatttctcgttgttccagtcgttgccggactcgtgggcgatagatcagatattccctatcatgcctatccagcgtctggacgagaagcccgacagaaatgctaccttgcaggatattacttgtgattcggatggaaagattgccaattttatctctacccgttatgtatcgcatgacctgccggtacattcgttgaaaggaaaagacgcttattatataggtgtgtttctggttggtgcttatcaggagattttgggtgatatgcacaatttgtttggagataccaatgcggtgcatgtcacggtggatgacaaaggatattccattgatcaggtaattgatggtgaaacggtggccgaggttttggattatgtacagtataatccgaagaaactggtgcgtacactggaaacgtgggtgaccaaatcagtaaaagaaggacgaatttctgtagaggaaggaaaagaattcctctctaattatcgttccgggttgtacggatatacttatttggaataataacatgaaagagaaactgactatcataaaagtaggtggaaaaattgtagaggaagagtctacacttaatcagttattgactgatttttctgctataggaggttataagttgttggtacacggtggcgggcgctctgctaccagactggcggcacaactagggattgaaagcaagatggtgaatggtcgccgcattacggatgcagaaacgctgaaagtggtaaccatggtatatggcggactggtgaacaagagtatcgtagccggtcttcaggcaaaaggtgtgaatgccattggactgaccggagctgatatgaatgtgatctgttcagtaaagcgtccggtaaaagacgtggactatggctttgttggtgatgtagagaaagtaaatgccaattttttggcggcattgatccgtcagggcattgtgcctgttatggctccattgacccatgacggcaaaggaagcatgctgaataccaatgctgataccattgccggggaaaccgctaaagcattggcctccttgtttgatgtgacattggtttattgttttgagaaaaagggtgtattgcgtgacgagaatgatgatgacagtgtaattcctgtcattactcctgaggagtttaaagaatttgtagcgcaaggtatcattcaaggagggatgattcctaagctggaaaattctttttctgctattgatgcaggcgtcagtcaggtggtaataaccttagcatcagccattagtgaaggaagtggaaccgtaattaaaaaataattcaaaaaaacaggcgggtgagtgtaactttagtgtaactcacccgtcattattacagagcaatgcgagagatcagtttccgaaacgatattctgcccctgaaagacaaactctacaggttggcgcttcgtattacgctgaatagtgctgaagcggaggatgtggtgcaggatacgatgatcagagtatggaacaagcgggatgaatggccgcagtttgaatccattgaggcatattgcctgaccattgctcgtaacttggcaattgaccgcagtcagaagatggaagcgcaaaatttggaactgacctctgaagtgcgggagatgcctgatacattgacgccttatgatcggttggcgcagaacgaacaaatacagttggttcaccgtctggtcaatgagcttcccgaaaggcagcgtacaattatgcagttgagggatgttgaaggaaagagttataaagagattgcagatattttgcagattacggaagaacaggtgaaagtaacccttttccgtgcccggcagaaaataaaacaaagatacactgaaatagaggattatggattataaatatattgaacagcttttggaacgttattggaattgcgaaacttcattggaggaagagcaaatattacgttcattctttcgtcagaaggaagtgcctgctcatttactccggtacaagcagttgtttgcttatcaggatgtggagaaggagaaaggtttgggagatgattttgataccagaattctgacccggatagaaagaccggtggtaaaagcacaacgtctgactatgcgtacgcgctttatgcctctgtttaaagcggctgcaatgattgccgtgttgtttcttatgggtacagtgatgcaacacactatggaaggtggtgatagtgatacggtatcggtacacgatgagtatcagaattctactaccgacccccaagtggcatacgaacctgtattgcctacagatacggtggcaaagattaccgttgatgataccggtacagggaaaacaaactagaacattttcatttgcttttatataaatatgatagttagtgcttattaaaacaactttttaattcgaggctgtgaagtttcaattctctcaaattttaaattaactaactaaataattttaaaaaggattaccgcgtgagcagtaatccttttttgcttggtagataatttaatgtaaagagagagttatgaaatgagttatttgctcttaacgcttccaattccggatttttttagtccggtaacctgagggtcaccgtagtagtttacacttcctactccctgggcactgatatttatcgtcccggatgcataacaagaaacacttcccacaccgttttgttcaactacaacatcagaaacaatcatgtcttttgctttcaggctacctactccttccaaataatatgtcgcatgaccggcctgcccctttaaattgatactgcctactccttcttgggatactttgatggaacgtgccattaatgcatttgcttcaatactccccacaccttcagcactgatagaaagatctgttactttcacgctgtctttcagataaatacttcctacacctctttgcttgatactacataagaccggactggtaattgagatattgatttttgaactcttgaagtttttgaatttgtctttatccatactgatactcagcgtactgtctttgaccatgacaatgagttgggggatgtaattatccggaccgtcggcttctactttggtcacattcccttgagtaaagacaatgttggcaggtgctttgttctctatcttattgaaaggagttacgctatattttttggtcattttactcttgctgggtttcggacctgatgatatgtggaaacagcctgtcatcattgtgattgccagaaaaagactgaaaaaataaatagtttttgttctcatggtaatatatatatttaattggtttctgttaattagacggtgaagattcctggaaagttgcaaatctctgcctttttttattggaaagctgtatctttgtatccgtatggcaactaaaagagtacttccggataaagattttgaccgtattatagtgcgtacacacaagctggcgcgtaatgttactatgcgggtaaagcccgacggactgcatgttactgttcctccttatagtttaagcagcaaagtgctggaggtggtggagcaatacaagcaacgtctgttggaggactggaggaaagtgagtaagaaaccgattgatttaaattttcgtattcatactccctgtttccgtttatggctggagcaaggtaactttacttgcttttccgtacgttttaccgaggagggagtcaagattatctgtccgcggaatgtggatttttctttacctgaagtacaaaggctggtacgtaatgccatcatccgtgccatgaagaaaaatgcgcaagaatatctgccacctcttttatccgctttgtccgaacagtatcatttgccatttaaacgtgtgaagattaccggcagcaagggaagatggggaagttgttcgggaacaggcagtatcaatctttcctgttatttgatgttgttgcctccccatttgatggattatgtgctgttacacgaattgtctcataccaaggaaatgaatcacggccctcgtttttgggagttgctggatagtatgacaggagggagagctcgtgccttgcgtgcggagttacgtagatttaatactgatttttagaactattaaatagaattacaatgaaaaacagatttttaagcatgcttattggggctgtcttgttcgttctttcagtagcggccgaaaattatccttatcggagtgatgtgctttgggtaactgtacccgatcatgccgactggttgtacaagacaggcgagaaagcgaagattgaggttcagttctataaatatggtgttccgcaagatggtgtggaggttttatatgagctgggaggcgacatgatgccttcggataccaagggaactgtaaaactgaagaatggaaaagcggttatttctatggggacaatgaaagagccaggtttccgtgattgtcgtctgacggctaaagtaggaggtaaaacttattcccaccatatcaaagtcggtttctctcctgagaagcttcaaccttatacccagttgccttctgattttaatgaattctggaataagactaaggcggaagcggctcagttccctctgacttataccaaagagtatgtaaagaaatattctacggacaaaatggactgttacttgatcaggcttcagctgaataagcagaaccagtgtatttatggttatttgttctatcctaaagcggaaggaaagtatccggtagtactgtgtcctccaggggctggcatcaagacgatcaaagggcctatgcggcataaatattatgcggaagaaggctgtatccgctttgagatagaaatccacggattgaatccggagttggatgaggatactttcggcgagataagccgcgctttcagcagccgggaaaacggctacttggtaaacggcctggatagtcgcgagaattattatatgaaacgggtttatctggcttgtgtccgcagtattgatttgctgacttcattacctgaatgggatggtaaaaatgttattgtgcagggggggagccaagggggagctttggctttgattacggcaggacttgacaagcgtgttacggcatgtgtggcaaaccatcccgctttaagtgatatggcaggttacaaagccggccgtgccgggggatatcctcatctttttaagaatacggtagatatggatacacctgccaagatgaagacccttgcatattatgatgtggtgaattttgccaaacagattactgttcctgtttatatgacatggggattcaatgacaatacttgtcctcctactaccagttacattgtctataatgtactgaactgtccaaaagaggcgttgattactccagtcaacgagcactggacttctgaagacacagaatacgggcatttgctttggataaagaaacacttgaaataaatcgatggaaatagatgtttttaagattataattgctatatttgtttagcatagtgtagcaactatctgtattttgatgttgaacccttaaatcgcaaacagatatgaccgacctcaccattctaatcgctgttattgcattggcattgtggccgcttgcatttttagttcttcgcatccgtcacgagcgtaaaaagcgtagagaccgtttggaccgtatgacaaaggaagatctggaggatatcggtacggaagagctggttatagctgtgctcaaaaagataggctgtcagccggaaaccaatgaggaaggacatattgtctttaaatatcaaggtgatgatttttatattgcggtggaggatgaggcccggttcatcatgatatggaatccgtggtgggcgtctatcagtgtggataatccggctttaccttacttaaaagagattgtcaatctggtcaatgtggattcgttggtgaccactgtctttacggcggatgaggatgagaaaaacgtggggcttcattccaagtgccatacggtctttactcccaaagaaggccagttggacgaatatctgaaagctatgctcgatcatttctttgttactcacgatgctatcaagcaaaatttgcagcaactgggtagtgccgcttcggaaagtgttaataaggaacggacaaaggtgaaaggatttgctgtttataaagagaacagtacgccactgtcttctgtcgaagaagagaaaaaataaggaatgttttcattcgttccggcttttatgaaagttgctttgatgtatggttcaaagcaactttatttgtgtttatacttatgctaaatcctttttctcttaagtattttttttcttatctttaagttcttttttcttgaaatcctgaagttcaacaagaaggaagataaggtggagggcatgtttgacaaatgcctgttcgttctgcgtaatctatcttcccttcttgagcgtctgtgtgcgttgcagagccgtgtattcgaccgttttttcgaggctgccgagattgcgaaattcacctctagggagtttggtgaacattgggaaaatttgaagagcttccgtgattggtatagcgtaatgtctactcaattgaagaaaggacgtgaggaggaccctaaagagggactcgaaaaaggtcgggtcagcggattttccgggttggcaagctttcttttaagcgtatagcctagccagtctgaacatgaagaacttcagatcagccacccctcttaactggcttcgaaaagctttgattttagcattgaacgactccgctgaagcatttgtcaatcgttcttcaaaataatttatgatggtcgtactatggtttgaaaaggtatcaagtaccttgttgaactccatatagtcaaacttttccacttcattgtaccatcttgcgagatttagccttgcttcatcgggacctgacttcttgttgaagatgtctgtcagtttcatgctaaggctgtatccttccagaagcttggggaatttatcaaagagaatggcagccctggtcttttgctgttcattccatttgctccagtgtttcagtataatatgcttgcttctgcttactatctgtggcagggtttctccgttctccattctttcaggctcccatttccctattctctccctttccgccttactctttgcttctttcttcttttgacggtgctccctgatagcctgattttccgcatcaagtactttccaccgatagcgtattcttaactggtctacagcttcagacatgagctgctgtacatgaaaacggtcattgatcagctttgcggcaggaaacacctttctgaccgtcagcatcatggctgaagataaatctgtagtgacagtcttgacagacagccgtttccggtgcggaagcctgcgcaagattccgcttaccgcatctgtggccactccacgaaccattgcaactaaagcccccttacggcctttagctgctttattggtcagaatcgtataaacatctccattgctcaggcaagtttcatccaaagaaaggttttctccaatgttttcaggataaaggaggtagtcatgcgcatgttcgagttggtcccagttccggtaatcactgattttctccttgtattgtttacgaagagtctgcccttttacgccataacgttccgcaagcacacagatactcacaggagtagattcaatctccttcttttaaaaaagaaacgaactcagaattcagccgtgtaccgtcaaattcggataaatcccagtcatagctgaagatttcattggaagacttgtcaagccatttacgtttacgaacatggagataagtggcgcgaccacgaataggatagtcttggattgtacggtactcaccaaaaccataggatatgatatccgggttggtcttatcttcttttagctgaacttttttttcatcaagataaatatcaaaacggtcagcactcttgtcgaaattgacaatatcaaagttgtctataagcacatccggaaggatggcacgaaggagtcgttcgggtttcataaaacaaaggtaagcaaaggtagctaattttaaaacttaacaaccagaaatttccgctgagccaaaaggtctttaggaaggatttgaaacaggtcgtaaggaagaatgctaaaaatgaaacagggcggtattgcatttgatgtaaattgcctaggttaccggtttatcggctcaggaaataatgtttctttaagttcttttctggagaaattgacttcgtaaagtgattaagttggcttgatgcctgaaacttgttgaccgatttccgttcaaagagtttgttcaaattatttcggtgaatcttttttaaggagagaatctcttttttgtgatagtaatcaattgattaacaattgattgtttccttcttttatatatgcttatttgtatatctcttaccaagagatatacattttctgtgcaaaaataagcaaagttttgagaactaatacatttttggcaaaaaaaataggaatttatataaaaaataagcttccaagtccatttttatactcctttatcctatttgaaataggatataatatgttgatatattgtttgttagttactttctatagatctcttggtaagagatctatagaaaatgtcgtttttaagttcctttattatatgataaagtatgtctttgaagcgatgagaatgaatgaaattaacatagagcagatggaatatctatttctaagacgtaaacgaagtagcgccgtttccgagcggcagaagaacttgcttttcaaggccgcccagcggcattgggaggaggagtttgtcggcaaggaagtgaatattcgtaaagtggactgccgtatatataaagctatattgtaccagcttgagatacgtcagatattccttgacacttcgctttcgctgaaaaaactgagcgatttgcttgaaacaaaccagacctacctgagtaatgtagtaaacaaatactttggctgtaacttgaaggagcttgtgaacggctatcgtgtggaatatgccaaggagcttcttagtttcggtcgttgtgcattgaatgacttgcctcgtagttgcggtttcgcttctaaaagcgctttctattcagctttcagtaaggttgcgggtgtgtcacctttgtcttatcagtcacgggaaaggaggaaacgggagttacaggtaataaacgaactaagatattaataatgagattaatatgtataatcaattttagttttttaaatttataaatttaaagtttttctattatgaacaaaaagtttttaagtgcaatcctgttcggagccttgatggtttcgtcaacgggaacatttgtgtcttgtaaagactatgatgatgacattgacaacatcaataaagagttgtcgactcttaaaggagatctgagtgctttacaggcaaaagtaaatgaaggcaaatggattacaagtttggctccaactactggtggttttaccgtaactttttcggataacacttcttataccattacgaatggtaaagatggtgctgctggtgctgatgctgtgaaatgggagattggtactgacggtttttggtataagaatgatgtaaagaccgagtatcaggctgttggtcaagctggcgaagctggtgtatctccttatatcggtgaaaacggtaactggtttgcttataacaccgagacaaaagaagtggaagatacaggtatctctgctgctggaaccagtacctacgtggtgaagaatggtgataactatgaattgcatgtgtataaccagactaccggggaatatgagtcaatcgttcttcctgctactgctgcagcagctgctttgaacgtggtgtttatgccgacatatagtgatatgcagactaaagtggttgctatcaatatctctgttggtgacgagtttaacgataagaaccgtttgtgggataataatgtttcattgactaacgatattgttttcaactatcgtgtttctcctgcaagcattgatttggcaaaagcaaatattggcttcttggtaaatgaagtacagtcaagaactgcaggttctatcttggaagttgctgataaatcgtttgctgatggtgttttggctgtaaaagctaaagctggtgaagcattctctttgaagaataagaaatatgccgtggctttacaggttcagaatgatgcacagagcgcaatttctacttatcatttgcttacatctaatacaattaatcgcgaagacttgacagtattcgaagctcgtaaggatgataatggagagattgggtatttccagttcctttctcttgatataaacctcttatatacaggtgaattgaatgttgctgatactttaactgtaggacgaactgttagggataattctatgaatacttcgtcatatagtgacttgagaaaatacggttttactccttactacgaagtagttaagaaagctggtgaagacaaaggcaattatttcactgtagaaaatggcgttattaaaactaacggacaaatttcttctgtaggtcataattgtactttcattgtatctgtatatgataagaaagacggatataaattggctgaaaaagaattgactgtatcgtcagttgagaagattgctactactaagacttatactaaatctgaaactcatgaattaactcttgaatcaaaagattatagattcaagtttgatatgaatgatgtatataatacattgggcatgtcttctcaaactttctggaatgcaggatattcttctgaatattatatttgggatgcagatagaagtgaatatgtacaatcaagcagtagtaatggtgttatttctgctggttcagtatatgaaaacaatgaaaagatcttgtatgtagatgttaagaatatcttgactaaggatcagcttggtaagtacaaagtagtatttaagattggtaatacaggtgcagaagttgtttatgaggttaaggtagtatatcctgaagtgactttgattaaagacaatgattactggaaagatggttatatgattaatgccggtaaacttgtaggttctaattatgttatgtctggtgacttgcgtcgcggatataagaataaagaccttgatttggtatttgaaacagtagctggtgaaactcgtacagactttactttgattaacaatgttctgacatatacaggagattgcaatgatgaagaaggtaaccgtatcaatatctctactatcgatccggttgatgtaatggtatttgttctgattaatggtcagaagattgacaatggtactaagatccaggttaagtttgctgacccgttgaagaatatcactttgaagaaagatgccaaatttgaaactacagacaagaagagtccagccgataaattgcagttgaattctgcaatcaacttggtaagcattgctggtgaaaaagtaattgaaaacggtacgatgaatgctactattgccggttactataatgctcaagcagctaagttcgaagtatcggaagaggatgctgctaagggagctagtgtaaatgctacaacgggtgaatttacatggcagaatgatggtgtagctttgacagccaacaagactatcaatgtgaaagttacggttacatacacttggggtgttgcggttggtacaattcctgtaactgtaaaatctaacctctaatctgaatttagatgattaaaaaataatcatactataaagtaaaagtccgcttctccttcgtgagaagcagcttctacccaaagtagaaattataaattctttcaagcggggaaagcatacgtatccggcaacgggcgtttctttccccgcttttttttaaggaaatgactctgaagaatagtttgtttcttttccggttagagtctgttcattgaataaattgtatataccatgaataaagtagaagagataaagaaaaaaatcagagatttgaagttaaagcagaagatgacaactgggcgtttggaatggaacgatatacagagagaaatagacattttgaataatgagttaaagcaactagaaacagacaaaccacaatatggaaaatagattatacttgtacaacttaggtataaagacatttggcggctttgcaacactgggtggagttatacaggctttgcaactatttacgcagcctgatcttgatattaaatcaattttgctttcgtttcctgcgtgggtagtatatgtatttgtatgcctgactattatttttgctatgttgagggaacggtacaaatcgatgagtcaaagggtggaagtattgaatgttaaattgaacgagcaagatgcaatgattcgttcattgcaggaaatgatgaaaattgtgccattcaaaggacgctttttcttgaccacagaatatttatacaatgaattgggggaatatatacagaataacattgatattgattcaatagagataaagaatacaatagaaaaaagaggtatgggaaacaagagagattcctttgtccgattaaatataagaggtgttgtttcgcataaaatcagtacatttcatttgctggtggcaggtgataccattgttaactttgaagatataaacatacaagcgttcgagcgtgttggtgggaagcagaaaaaattatgtgcaagaattgctgataacggacaggattctttgttgaagcaggttgttgtttcttatggcaaagtaaaaagtcccggtagtattgttgatttgatgattgaatggtgctggcctaatatgttgaatgttacagattgtgactatactacattgcctaattttttggctggtacggtgaaacatctgaaaatgtctttggaatgtaaagaagatataggttttaaatcggcaagtatatataaatataaagtcggtatggataaggcccagttgattttggacgttgatatgtccgaaatcacagatacgatatcttatgaagaagataatccgttaatgaattctacttatatattgtattacgaagttgccagatgattggaaatctgaaaaaatatatagataaggcatcttttatggaacatatagatgccaagctgcggcagaatgaacctatgattatagattcattcgtcagtaataaatgtaatctgaaatgtagacattgttattttggagatgcccggcccatatcagagtcggtttctttggcaagatggagaagttttcttgatgaagctattggaatgggtatgaaacattttcatttttcgggtaaagaatcttttttggataatagaatctttgatatcctgaatcttttagcagagtataaagaagataggaaaatattttatggagttgtttcaaatggaatgagtatggatattcaggggtatgacgaagttcttgcaaccaacatttcataccttgaaattagtcttgagggctctggaaaatacaatgatttgataaggggtgagaacggatacaatacggtttatgagttgattgaaaatgtggagcatcgagataaaataaacattacttctactatttttgatgataatggagctgatttattatccatgttgcttgcatattggaaattaggagttgataaatttaattttgctcctatcatgtattattcaccatttgaaatgaaaccattgaaaagtttgtcgtgtgaatccttgcttggttttgtttcgctctgtcttgattttatgaataatgataacagttcggatgctattgatataaggatttgtatgacgaaagcaatggcgtatgaactgtttttgaaagaaaatatattaaccggaaaaatagaggaatatatatacagaggcaataaaatgaaatatcagagggggaataaggtgttggagtttagttatcctttactcagcattccattccttaatgaattggtcgttactcatgatggttacattatatcctgtgcagatgatattcattataagtatcttgataagatcgctttaccgaacgtgaatatagtaaaaaacagttttgcagaaatattgcaagcgagaaacgaatttattttgtgttatttagacaaagaattatctcaatatactaaatgtttataattatgaaaacacaagaatttgtagatgttcgggtgggtgaaagcactcagccggatcacggttatgaattgagtgataagtgtataataacgaaaagttcaaatgctgtcgctagcggagcaggaagcaaaggcttgttttcgtataaaagtactaagctgaaaagtgctgaatgtaaaatcaatcagagtttacgggatgttgataatggagcaggaagcaaaggtttgtttagtgtgaatgttgattagtaagcatggctttgtagagaagtttgtttgtctttttaacttctgaacatgaagctaaaatgtttgacctcttttgcatgtggcaacaataaattgacataaagcaagtaatcattccttttcttataaaagtgtgctaaaaacacttatatctgaaaacataacaattatttttgtacgttttttaattaatggattgtttttattcaggtatgaagaagagtttgacggctttggcgttcggcacattaggattgggcattgccgagtttgtaatgatgggcattttgcccgatgtagcgaaggacttgcatataagtattccgcaagcaggacattttatttcggcttatgcactaggtgtgtgcgtaggagcaccggggatggttttggtggctcgtacccgtccgctgaaacatattctgttaggcttgatggttatttatatttgtggtaatttgtgtgctgccgtttcagtgaattattggatgatgttgatgatgcgttttatttccggattgcctcatggcgccttctttggggttggttccattgtggcggaaagagtggctgataaaggaaaaagttcgcaggcagtggcattgatggtgtcgggtatgacgattgccaatctttttggtgtacctttgggtacgttcatgagtaatataatgtcctggcgtattccttttctctttaatggagtatggggactgattaccttgttctatatttggaaatgggttccttcactgcctgctttgccggatacaggtttgaaaggacagttccgttttttgaagaatctagctccatggttgttgatatttacgactatgtttgggaatggaggtatcttttgttggtatagttatgttactcctttgatgacacatgtggcaggtttcagtgagaacagtatgactttcattatggtgctggcaggtcttagcatgactgtaggaaacttgatgggtggaaagttttctgatcagtatggagcagcccgtgtggtgaaatatacacagattattatggcctccggtttgcttgccattttctttgcagcttctatctcttggctggcagtgatattgatgtgtgtatgtacggcaggattatttgctgtttcggctccacaacaattattgttactccaaaattcacgcggaggagaaatgatgggagcggcctgtgtgcaagtcgcttttaatttgggcaatgccattggtgcctatgccggtgggctacccatagatgccggattgggttatcggtatccggctttggtaggagtttttatcgtattgaccggctttgtcgctgtttccctttattccaaaagggaatcggcttctctttccaagatataaatcacatctccactctttttaacctctacccggctaccttccggattcaggttgaaaggtgtggtcttgtctgttttgttatctacgaccatcagtacattatcttcggcaaagcgctttatttccactttcaggttggcgtcgggcatggtttggtccagcagcagactgtcatttagatataccgctatactatctccggcaaaactattagttagttctatgttgtagactccttcataagtctgtactttgtcagccttgcgttggaaacggaaggacatatacaaaaaaatgataataacggcaaagactccaaaagccagcataccgttacctatcatgaattgcttgttcgtatttaaactgtttttatccatagtgttataagtttctgcaaaactacaattttttaatagaatattttgtagcactggtagataatttgtatctttgcaccgaaatggatgaatggtggggcttgattaagccctttttttgttcttaatagtgaataaatgatagataaaaatgtagtaacccggattgttgacgagtggctggaaggtaaagattactttttggtagatgtcacggtgagcccggatgacaaaattgtggtagaaattgaccatgccgagggagtatggattgacgattgtgtagaacttagccgctatattgagtctaaactggaccgtgaagaagaggattatgaactggaagtgggttcggccggtataggacaacctttcaaggtattgcaacagtacttgatacacattggtaaggaggtggaaatcctgactaaagagggaaagaagctggaaggtgtattgaaggatgcaaatgaagagaactttaccgtaaccattgaaaagaaagtgaaaccggaaggagccaaacgccccaaactggtagaggaggatattacttttgcgtatgatgagataaaatacactaaatacttaattagttttaaataattatggccaaaaaagaagaaacaatcagcttgattgatacattttcggaatttaaggaattaaagaatattgatagaacaactatggtgagtgtactcgaagagtctttccgtagtgtgatcgcgaaaatgtttggcactgatgaaaattacgacgttattgtgaatcctgacaagggagatttcgaaatatggcgtaaccgtgaagttgtagcagatgaggatttgacgaatcccaatatgcagatctcattgaccgaggcacagaaaattgatgcgtcttatgaggtgggtgaggaagtgaccgatgaagtaatctttgccaagtttggccgccgtgccattctgaacttgcgtcagacgctggcatcgaagattttagaactggagaaagatagcttgtataataaatatattgatagggtgggtactgtaatcagtgcggaagtctatcagatatggaagaaagaaatgttgttgctggatgatgaaggcaacgaactgcttttgcccaagactgaacagattccgagtgacttctaccgtaaaggcgaaactgcccgtgccgtagtggcccgtgtagataataaaaataataatccgaagattattctgagccgtacttcacctgtgttcttgcaacgcctgtttgaaatggaagtacccgaaatcaatgacgggttgatcactatcaagaagattgcgcgcattcccggagaacgtgctaagatagcagttgagtcgtatgacgaccgtatagacccggtaggtgcctgcgtaggtgtaaaaggatcacgtatccacggtattgtgcgtgagttgcgtaatgaaaatatcgacgtgatcaactatacttctaacattcagttgttcattcagcgtgcgttgagtccggctaagatttcttctattgtgttgcacgaagaggagaaaaaagcagaagtatatctgaaaccggaagaagtgtctttggcaatcggtaaggggggaatgaatatcaaactcgccagtatgcttaccgaatatacgattgatgtgtaccgcgaattggatgagagcgcgatggatgaggatatctaccttgatgaattcaaggatgaaattgatgagtgggttatcacagccatcaagaatattggattggatacagctaaggctgtactgaatgctccgcgcgagatgttgatagaaaaagcggacctggaagaaaacacggttgatgacgtgttgagagttttaagagctgaatttgaagagtaactcttcagtcccggctcgtagttaataattaaaaaacgagtatgacgattagactgaacaaagtaacaagagatttaaatgtaggaataacgacggtagttgaattcttgcagaagaagggctataccattgaggctagtcctaatgcgaaaattaccgaagaacaatatgctgtacttgtgaaagagttcagcacagataaaaatttaaaaatagagtctgaaaaatttagtcaggaaagacagaataaggatcgcaacaaagcttctatctctatcgaaggttttgaatctaagaaagagaaagaagaggtggtgaaaactgttattcctgaagaggcacgccccaaactgaagcaagtgggtaaaatagatctggacaatttgaacaagaaaactgcgtcaaaggttgtagaaccagctgcgaaagttattgaacaaactccgaaagcagaacccgtggtggaaaaggtggttgagaggaaggaaactccccagccccagaaggaaacgccgaagcctgtggtggtagaggaaaagaaaccggaatcgactcctcaacctgctcctgctccagttttggaagagaagaaagagcctaaaattgaaaagacggaagaaaagacaccccaggtgaaagagatggaaaaagaaacacccgaagcagcacccgttcaggaaaaagaagaagacgatgtatttaaaattcgtcctactgaatttaaatcgaaaattaatgtagtaggtcagattgatctggctgcattgaatcagtctacccgtccgaaaaagaaatcgaaggaagaaaaacggaaagagagagaagagaaagataagcagcgtcaggaacagcgtaaactgatgaaggatgctattatcaaagagatccgtaagggagacgataagatttctaaaaacttggttaacgatgatgccgcaaagaagaaaaagcgcaatagaataaataaggaacgtgtggatataaatgctgccggtacaacgaatgttggaggagcatctaataataaccaacgtaacgataacgctaacagaccgaataggaacaataactccaaacctaatagtaataacaatcagggtggaggcaaatttaataaagaccgtttcaagaaacctgttgtaaaagcggaagttagtgatgaagatgtggcaaagcaggttaaggaaacattggcacgtctgactaacaagactaagaacaaggctgccaagtatcgtaaggagaaacgtgaaaatgttcagaaccgcctgatggaacaggaggagatggaacaggaagatagcaaaatattgaaactgaccgagttcgttactgcgaacgaattggcaagtatgatggatatccctgttactcaggttattgctacttgtatgagtatcggtatcatggtttctatcaatcagcgtctggatgccgagacaattaacttggtagcagaagaattcggatacaagacagaatatgtaagtgctgaggtagcacaggctattacagaagaggaagataacgaagaagatttgcagccgcgtgctccgattgtgacagtaatgggacatgttgaccatggtaagacttcattactggactatattcgtaaagcaaatgtaattgccggtgaggcagggggtatcacccagcatatcggtgcttacaatgtgaaattggaagacggacgtcatattacattcttggatactccgggtcacgaggcatttaccgctatgcgtgcccgtggtgcgaaagtgacggatattgctattattattgtagctgccgatgataatgtgatgccgcagaccaaagaggcgattaatcatgctatggctgccggtgtgcctatcgtatttgctattaataaggtggataagccgcacgccaatccggataagattaaggaagaactggctgccatgaacttcctggtggaagagtggggtggtaagtatcagtcgcaagatatttcggcaaagaaaggtacaggtgtacatgatttgttggaaaaagtattgctggaagctgaaatgttggatttgaaggctaatcccgaccgcaaggcaaccggttctatcattgaatcgtcgttggacaagggacgcggttatgtggctactatgttggtggcaaacggtacgctgaaaatgggcgatatagtcttggctggtactagttatggtaaggtgaaagctatgtttaatgaacgtaaccagcgcatcaaggaggccggtccttccgaaccggtattgattctggggctgaacggtgctcctgcggcaggtgatactttccatgtgattgatacggaacaagaggctcgtgacattgccaacaaacgtgaacagttgcagcgtgagcagggcttgcgtactcagaaactgctgacattggatgaagtgggccgtcgtttggctttgggtgatttccatgagctgaatgtgattgttaaaggtgacgtggacggttctgtcgaagcgttgagcgattcattgataaaactgtctacagaacaggtacaggttaatgtgatccacaaaggtgtcggtcagatttccgagtcggatgtgactttggctgctgcatcagatgcgattattgtaggtttccaggttcgtccttcaagttctgccggcaaactggctgagcaggagggtgtggatatccgcaaatattctgttatctatgatgcgattgaagaagtgaaggctgctatggaaggtatgctggcacctactttgaaggaacagattactgcaaccatcgaagtgcgtgaagtcttcaatattaccaaggtcggtttggttgccggtgctatggtgaagacaggtaaggtgaaacgttctgataaggcacgcttgattcgtgatggtattgtagtctttaccggtgctatcaatgctttgaagcgtttcaaggatgatgtgaaagaagtaggtactaactttgaatgtggtatcagtctgacaaactgtaacgatatcaaggtcggtgatattattgaagcttacgaagaagtagaggttaaacagactttgtaatatactgaagtctgagaatatagatggtaatgtcatcctgagcatagcgaaggatctggcacctcgcccagcgcgtgggctggcagattcttcgctttgttcagaatggcattactgctttttgtaataacgataaagatggcgacaatagatattattatattggctatgattggtgtgggtgtcattatgggattaatgaagggatttgtgaagcagatggcgtctattgtagggttgatagccggattgctgatggctcgtgccttgtttggcattgttgctgaaaggttggcaccggttttaggtacttcgacgactgtagcacaggtcttagcttttatattgatctgggtagctgtacctttaggttttgcgttcgtcgcctctttgttgacaaaagcattggatgctgtgcacctgggatggctgaaccgttggttaggcagcggattgggagcattgaagtatatgatactgatagggttagctattcatgtgatagaatatatagacccgaacaatgagctgattagtgcaacaaaaaagaaggaatcagtgttatattatcctatgagggacttgtccggtatcttttttccggtatttaagaatgtaacagaacaattaatagaaatataagatagatatgcaagaagaacccaataaatatgtgaaagaactgacgcaggagaagtacaaatatggcttcaccacagaagttcacacagatattatagaaaggggattgaatgaggatgttatccgcttgatttctgcaaagaaaaacgagccggagtggttactggagtttcgcctgaaagcataccgctactggctgacaatggagatgcctgcatgggcacacctcactatccctgaaatagattatcaggctatatcctattatgcggatcctacaaagaaaaaagaaggaccgaaaagtatggatgaggtagatcctgagttgattaaaactttcaataaattaggtattcccttggaggaacaaatggcgttgagtggtatggcagtagatgctgtcatggactctgtatccgtcaagactacatttaaagaaaccttgttggaaaaagggattattttttgttcgttcagtgaagcggtgcgtgaacatcccgatttggtgaagaaatatctgggttcggtggttggaccgcgggataatttttttgcagccttgaactcggcagtgttcagtgacggatcgtttgtatatattccgaaaggagtgcgttgtcctatggaactctccacctatttccgtatcaatgcggctaataccggtcagtttgaacgtacactgattgttgcggatgatgatagttatgtttcttatctggaaggatgtacggcccctatgcgggatgagaaccaattacatgcggccatagtggagattgtggtgcatgaccgtgcggaagtgaaatattctaccgtacagaactggtatccgggagatgccgaaggcaaaggaggagtatataactttgtgacaaaacgtggccattgcaaaggagtggatagcaaattgagctggacacaggtggaaaccggatcggccattacttggaaatatcccagttgcatcttgagtggagataattctactgctgaattctattcggtggcagtaacgaataactatcagcaggctgatacggggactaaaatgattcatttaggtagaaatacccgtagtaccattgttagtaaaggaatcagtgccggaaagagccagaactcttatcgtggtctggtacgtgtggctcagaaagcagacaatgcccgtaattacagccagtgtgactctttgttgctggggagccagtgcggtgctcatacattcccatatatggatattcataatgagactgctgtggtggaacatgaggcgacaaccagcaagatcagcgaagaccagttgttttattgcaatcagcgcggtattcctacggaagacgctattgggttgattgtcaatggatatgcaaaagaagtactgaataaacttccaatggagtttgcggtagaggcacagaagctgctggctatttctttggagggaagtgtaggataaatgaagaactaagaatttaatagaattatgttagagataaaagacttacatgccagtgtcaatggcaaagaaatattgaaaggtattaatctaagcataaagaaaggtgaagttcatgctattatgggacccaacggttccggaaagagtaccctttcgtctgtgttggtaggcaatccggcttttgaggtaacgaaaggttcggtgacctttgaaggaaaagatttgttggctttgaatcctgaggatcgcagccatgagggtctgtttttgtctttccaatatccggtggagattcccggagtcagtatggtgaactttatgcgtgcggcggtaaacgagcagcgtaaatataaaggccttcctgcattaacagccagtgagttcttgaagctgatgcgcgagaaacgggctgtggtagaattggataataaattggcaaaccgttcggtaaacgagggattcagcggtggtgagaagaagcgcaatgagatcttccagatggctatgctggagcctaagttgagtattttggatgaaacggattccggtcttgatattgatgcgttgcgtattgtagccgagggtgtgaacaaactgaagactcccgaaacaagttgtatcgtcattacacactatcaacggttgctggattatatcaaaccggatattgtacatgtattgtataaaggacgtattgtaaaaactgcgggtcccgaattggctttggaactggaagagcgtggttacgactggataaaagccgagttgggagaataatattggatgcctaaagaagaaagtgattatgagagcagaacaacaatatattgatctcttttctcaatgtgaggcgatgatttgccagcatagtgccgaggtgctgaacgctccccgtgcgcaagctttcgcagatttcgaaaaattaggtttccctacccgcaagcaggaaaagtataaatacacggatgtgagcaaattgttcgagccggattatggtttgaatttgaacagactcgacattccggtgaatccgtatgaagtgttcaagtgcgatgtacctaatatgagtaccgctctttattttgtagtaaatgatgctttttatcgtaaagttttgccgaaggcgcaattgccggaaggagtgttgcttggcagcttgaaagagctgtctgaacaatatccggctttggtcaagcagtattatggcaagttggcagatacttccaaggatggtgtgaccgccttcaatactacttttgcccaggatggctttatgctgtatgtgccgaaaggcgtggtggtggacaaacccattcaactggtgaatatattgcgtgctgatgttaattttatggtgaaccgccgtgtgctggttgtgctggaagaaggtgcgcaggctcgtctgttgatttgtgatcatgccatggataatgtaaatttcctttctactcaggttattgaggtctttgcaaaagaaaatgctattttcgatctttatgaactggaagaaacccataccagcacagtgcgtttcagtaacctctatgtgaaccaggaggcagacagtaatgtgcttttgaatggtatgactttgcataacggtactacgcgtaatacaactgaagtaactttggccggacgtggagctgagatcaatttgtgtggtatggtcattgccgataagaatgaacaggtggacaatcatactttcattgaccacaaggttgctgattgcactagtaatgagctgtttaaatatgtattggatgatcaggcgacaggtgcgtttgccggaaaagtattggtacgtgaaggagcacaacatactaattcccaacaaaccaaccgcaacctctgtgctactcgtgatgcccatatgtacactcagccgcaactggaaatttatgcggatgacgtaaagtgctctcacggagctactgtcggtcagctagatgaaaatgcgttgttctatatgcaacagcgtggtatcagtctgaaggaagcacgtttattgcttatgtttgcttttgtcaatgaagtaatagatacgattcgcctggatgcattgaaagaccgtttgcatttgttggtggaaaaacgcttccgtggtgagttgaataaatgtcagggatgtgcgatatgtaaataggacgttatgtacgatatacaaaaagtaagagaagattttccgatattagatcgggaggtgtatggaaagccgcttatttatctggataatggggctaccactcagaaaccgcgccaagtggttgaagccataaccgatgaatattattcggtcaatgccaatgtgcatcgtggtgtgcatttcttgtctcagcaggctaccgagttgcatgaagcttctcgtgagactgtacgtcgttttatcaatgcacgcagtagcaatgaaatcgtgtttacacggggcacgacggagagcatcaacctgttggcttcttcttttgccgacagtcagatgaaggaaggagatgaagtgattgtttctgtcatggagcatcacagcaatattgtaccttggcagttacaggctgcgcgtaaaggaatcgtgctgaaagtgattcccatgaatgacaggggagaactgttgttggatgaatatgagaaactcttttcggaacggaccaaactggtgagtttcgctcatgtaagtaatgtgttgggcactgtcaatccagcgaaagagatgattgcgactgcccatgcacacagtgttcccgttttgattgatggagcgcagagtgttcctcacatgaaagtggatgttcaggatttggatgctgacttttttgctttcagcggacataaaatatatggacctaccggtgtgggagtgctttatggaaaagaagagtggctggataaacttccaccttaccaagggggaggcgagatgatacaaagtgtcagcttcgagaaaacgacttttaatgaattaccgtttaagtttgaagcgggaactcccgattatatcggcactactgccttggcaaaagcgttggattatgtatctgccctcggcgtggaaaatgttgccacccatgagcatgaactgacacaatatgctatgcagcgtctgaaagaaatagacgggatgcgtatcttcggagaggccggtaacaagagcagtgtcatttctttcttggtaggaaatattcatcatttggatatgggtacgttgcttgaccgcttgggcattgctgtgcgtaccgggcatcattgcgcacagcctttgatgattcgtatggggattgagggaactgtacgtgcttcttttggtttgtataatactaaagaagagatagatgtgctggctgccggtattgagcgtgtcagcaggatgttttgatttctccaaacgaaataagtcgcctgtcattgataaacattatattaatggcaggcttttttgtataacaagaatcagcgtgacttcacacaagattaggagaaacttctcacaagatttgcctcatcttgtaacaagatatcaggcatcctagtttcttgcgtctttttatgttcttttttgtgggcatattcctcttccggtggaaaatatgctcctcccgaagaattgccccaaaaatccttcaaaagtttcagccttttcgtaaactccctgttcatgcgctttccggctgaaggattttttccaggctgaaagatttcgaggtatcaattcttcagccagaatgccgatgaacaaagcgtttgtggagaggctgaaacctctgaaggaaaaaataagtgttttgctatgtgtatataaagaaacaggagaaacaacaggacgtattaataaaagctcttgatgtttttttaatatgtcctgttgtttttaaaaaaggggcagatgttttgaagtttcctgttgtgaagtgtgaacatatactgatgtataggctgaaagatatatcatgtttcagccggaagatatataatcttacacctgtaacattctattcattcattggagaatttttatcacttctgaaaagagtgtattgggggtaacaggtaatacgatataaaagcagggggctacattcatcacgagtgcggcccccttttggtattatttatattaaggtaaaaagagagagtttatttgccataatcatcatataacatcagcaaatgtgatgaactccaactgaaatggggagcttttaacaattcaccggtgtgtgtgccatagttttcatgtatcggtgctccttctttcaagccttgcagacggtcgaatacctggagggtatattcatccgccatcttgttatatccatagttgcgcagaccgcggatagcgaaataagtctgatccaaccagatagggccacgccaatagccacgtgggttatacttcgggttgtctgctgctactgtggggaagggaatgtaggtagagaacttggctgtatcggtcagcaggggcaacatggcttttacctgatcggcagtagctacttctgtccataacggagtatatgcttcgcatcccggttcctgtataaagcttccgtcctttaaacggcgatcgaagaagaaacctttttctttgtcgaagaaataatcggctacttggctactgtaatccggaccgtcaaaagtaactcccagaatacttgcaaatttctttaatagtttacattccaaagccagataagcatttaaatcaacactttcctgatccatgctccatgcatcctcagccccgttatttttcagcatcttggcatcatcaaaacggatggcattatccataccgctttcccaggctgccgcttccaatgtgccatcggtagaaccgtattcacacataccgttgcggttatggtcacgcttgttataccaccatttgtaataggccatcaattgtggatacatttcactgatgaacgccgtatcattggtatgggtgaatatttcgtctaccgcccatgatacgagaggaggtttgctgtcgcgtgcattattttcggcaggatcggtatagatacagtctataatcataccgtcaggctgctggtagtcaaacatggcacgaatgttgtccttggccaattccggatcgaattttgccagagcagcagagaaacgccaagtgtcccaggcccagaatcctacgaagtagtatgcggcatggctcggaacaattccttcgtggagcaatccgccgcggtgggtacgccagttgctgataagtgtaacaactgctttcacggcgatacggtcatactcaggtttcatatctttgcgcagaatcttggtgagataaccttcccagcgttctttgttggctttgagtccttcctgcggattgctgagagccaattgtgctttttgtaatccggcagaaagttctttttctccggtatagaaagaaatggctacgtaggtgtcgtgttcgctgccattgatttttgcttggtaattattgtcagtgccctttacgctaacatccggggtaaaagttaatgctacaatctcaccggagggatgacgggcgatgacggtattttggtctgtttggacttgtatctcttttccccattggctggcagttaaggagagttccttctctgcatcggagtgaatgcggagcaatgcggtagaagcatctaaaaaattcaggcgttgaatgattttaccttcctctgaacttgccgaaagatataactctcccgggaaataacaagtggaatccggagtaaatataacattcgcctgatcggcatatcctaccgtgacagccgattgtgccatccattggcgtcggttcatatccagactgaacgggccacagaaaccgttcacccagtgatctttctgcggaagggtaaatcccatccaggaaccggcgtctgtgaaccaaccccggcaacgtgtcagtgtatcgggagtataggctatatccagtatgttattgaattcatatcttttgcctgtggggatgttctcactggcagggttacaggcggctgtgaagcctgcaactactgctgtgagaagaatgattttggtaaatttatgtttcatgttatttcgttatttgaagatcgtttcatcacagattattcagattaatacagatgcaatcattcacgaattgaaattcaatctgcgagaatctgtataatctgtagtgaatcagaatttttaaaaccatttcttatgcgctttttcagcagcatcgtcttgattgctcaaaggttgcatggtaaagctgtattgccattcgtgcggagtgatggtatattccggatgtacttgcgctccccaagtattatctccacctacccccatgtgacggtggtcgatgtttaaccataccatgtctttcttcataatacttccaccatgacggcgttctgtattgaatgctacatagtcaatatcctccaacgggaaattccatgcactgacattcagcggttcctcacctgtgattaacaggccttcccctgctttattacgcaatgcaacccatcgtacatcggttttgttgccggtttcctgtgcacggacatacggatggaattgttcccatactgtagcggtatagagtccgataggataacccgtcttgcggtctgcatagttttcttgtggtccgcggcccagccaggtcatcacatcatattctgccggaagaatcatacgcatacccagacgtggcatttcaggaagggctttgttgccgggtacaaagtgcatacttactttgacagctccattggggcgtacctgatagatggtctgcaaagttgattcttgtgcttccagtttataatttacagtaacggttgccagtttcttgtttgaatcttcttttaaatcgatactttgtaacttggcgttcttgcctgcaaatttccagatgccgcaacgctccagatggttgttggcaacatcattgtcggttaatgcacgccagaaattgggttgtaatccttcttttatcagattctttccgttgtataagagttctgtcatttcaccatcagcagtagagaatgcgatacggaagttctcccctgtcaaggtgatagcatccggagtacgttcggtatttatagttttgtctactagttcccgggcagtccatgtagcattcagcagccgttctccttccggattcagttgccattgctccatggctacctgatgtccctttggaactaatggggcttcctttttggtaaatgcttccaatttcaggaaatattcttttccatcgttaggaatcaagttcatcgggatagtaatgaaggcagaagaacgggcagtcattgtcgggaaatccatttcaccgctttgtacagcttttccgtctgtttctacagtccagtgtagtttgtaatcttccaagccgataaaatcatgccaattagtcactttgatttgcttggtggtaaaggcaaccggctcaaaatgaatgtattgatatactttttttacttcccagatgtgtggatgaagtgaacggtctgccgctaccagtccgttggcacagaagttggagtcattaggaacacctacaaagcccatatcgcctccgtaagcccaaatcttattgccgttcttgtctttgatatcaaaggtggcgtcaacccagtcccatatgaagccaccttgcagctggtcatatttataaatcaaatcccaatagtcttgtagattacctacactgttacccatagcgtgggcatattcacatagaatcatcgggcgggcatcacgctggtttacatggcggcgcagggaccagatgcgtgcatacatcggacagtagatgtcagatttggcatcataaccacctccctcatattgtacagggcgagtaggatcgaacttcttggtccagtcatataacgtttcaaagtgttttccgtagccggactcatttcccattgaccaagtgacaatggcggtgatattgcggtctcgcagcaccatgcggctcatgcgttgcataaacggtacttcccaatcgggattattagccagtgtgccatctttatgcgcctgcataccatggctttcaatgtttgcttcatctaccagatacaaaccgtattcgttacacaatgcataccattcatagcggttggggtaatggcaagtgcgtacagcattcaggttgaattgcttcatcaactgaatgtcttttatcatgctctctacggtaatggtacgaccatgatgcggatcgtgttcatggcggtttactcctttaaacaatacggctaccccatttatcagttgcatgccgttacgcatttccacagaacggaaaccgaaaggctgtgtgaatgattccaatgcttttccttgagcatcgtaggtactgactaccaatgtatagagattgggtgtttcggcattccaaggcaatatggccgggaacaagtgtttctgagcgaataaagtatctgtaacagaagttatttcctttttatgctgataaattacattgcctttgtccataatcttcacttccacaattcctcccggatgaggcttgtggagtgtgatatccagattaaaatctccgtctttataaccatttgtcagaccggctaccagtttgaagtcttgtacacggctttgaggacgggcatagagatacacatcgcgttcaataccgctatatttccagtaatcctgatcctccaggtaggaaccgtcactataacggaaaactttaacggccagtttgttcttcccggcttttaagaacggagtaatattgaaatgagccggaagacggctgtcttcactgtatcctgccaattcaccgtttacccagcaataaaaagcggactcaactccttcaaaatcaaggaagatatccattcctttccaatgggccggtacggtaaattcacgtacgtatgctcctaccggattgtaatcggttggaacatgaggcggattggcagggaaggggtaagctacgtcagtatagatgggggagtcaaatccttgcagttcccagcttcccggaacctgtatgtctttccagcgtttggtgttataccccattttataaaaatctgtcgggcattcctcattgtttttagagaataagaacttccaggttccgtctagtgaaatgcggcgttctgtagcagggtttactgcaaaacgctgggcggcaggtaaagcctgttgtttcagtgcattggcctcattcgtataaggaatgaaatgggcatgggcaggttcacggtttatttcatttatttgtggattctgccagggcacattttcaccccaggcggaagcacaaacaaacaacagtgtaagaacagtatgaagagagtgtttcatggttattgttattttaaatagaacagaaaagagtcacaagaaaaggtacgctgaagtctactacaaagccgtgaaatatagaaaccactacgaagctttgaccggaatagcgggtgatgatgggtaatgttgtatccatcgtagtggctcctccggcagaaataggggccagattgccaaaccagcgtactagcaacggggcaaaaagcaaagtgataatctcacgtgtgatattggataataatgcaatggttcccaactccggacctttatattctgtaataaagatactggatagagagtaatagccgaaaccggcacctactgccatacagtctgttactgagcggtgcgagagaaacagactgaccactgcgcatcctgccagtgttcccaatatggtcatgaccggtagaaagatcaggcgggggtttaatgaacggaaattacgtaaagtctgcggatcattacctacactgactcctacactgaacattaacgcacacaaggcgtagaaacttagcttactttgtgtaaagtcgtatggaataaggtgatataccccacaaagagctcccagtacaaagaatccgacgataatcaaacttcctttcatacttgtccctccttatttcttttgtaaagtacataccataaagcccatgctgctgtaacactgcccagcactgctgccaaggtgatgacaatggcttccaaccctatagtgtgcagaccattgataattttctgattgccgcctacatctatacccaataaaaagagtagcaaccaaataagaacggtgatgactttgtgtattcctgaaagcttctgcttgcgaagcaggaagccgaggagcatccccgtgagcattaatccaataattgtaaacatatctatgtcgttttatttataggcaaagatacttcatttttagattacaaggcggtatcactgtagcgaaaaccgccttgttgcctaattatatctaaccaaaaaagaaaatacttattttaaggcatcattagcattcagctctgtaagaggagtggggtagaatgagtttttgtcttcattgaagcctgttcttccggcagcttgcagggctgaggacagtttgccccaacggcggagatcataccaacgatagttctcaagagggaattcaatcatgcgctcgtgttcaatttgcgcgcggactgcttcttgagaagtacctgtcatgggtggcatatccccgtgaacgcttcttacttcattgattaaaggaatagcttgttcgggatgtccctgttcattcaatgcttcggctttcattaacagtacgttggcataacgcattaaaggaacattgatcgcagaatagttttggtttaaaccttcataggtcgagggcatgaatttacggaaggctacgcgttctttgttgtcgaaccagtcattatagtcgtagccatagacacgtccgttaccatcgttataatagtcacaattaaaaaataatgttgcatacatacgcgagtcataacgtcctgtagtagccgtttccccttcttttttgaattcactaatcaatgtttgactgggaagaatctcatcccatcccccaagttcggaaacaccgatccatcgatggaactgagtacgataagtagctccgtttgcagaactcatagagaattgaatttcaaaaatcgattctttactgttcttattatccccgctgaacatagtgctgaaattattaaccagttcatatccttttacttggttgaatgcttctatagcactggccagataagagtctttgttggttgcctcttcataggcgcgtgtcagataggcgaaaccaagatatgcataagcagaaccgcttgtggcacggcctacattatcagcgtcacgtgttgcaggcagactggttgcacgtttcaagtcttcaatgatgaaattccatgcatcctcacgggaagaaaggggcttgcttaattcagccgggtcagtgatatatttatcacgaactatgatttctttccagttcaataaaagttgcatgtggtaataagcgcggataaagtagccttcattgaccaattgttcgcgtgttgctgcgtctatattctcatcgggtatttctgcggttttttcaattacctgattagcaaaactgatgcctttatagtagcattgccagtaataactgaactgagagttaccattggtgtaggtatagttgcctaattccacccagttcgggtaattcagagcatcgcttcctaattggataatatcttcacgataggcttctaccggccatttgatttccgggaaagaccacatgtcacccgaataagtcatcaggtaaagttgggagtatgcggcggcaagtccggcttcagcatcagactggttacgccaaaaactgcttgatgtcaactggtcaggagattctaccgtgagataatcgtcacaagcgctaaataaacttgcaatgcagatacttgctatgtataatagtttcttcattttcttattactttaaaggattagaatgtaagttgagctccaacggtgaatgaacgggtaaacggataaatcaatttatcaacaccggtattcaacacactggcacgagagaattcaggatctataccatcatagcctgtgatagtgaacaagttttcaccacttacatagaaacgcagtttctcaatatagaatttctgcatgagcgatttgggcaaagtataacctaactgtgcctgacgcagacggacaaaatcaccgttttcaaggaatctgtctgattctttcatgttgccgttcggatcttgatatactgcgcggggaacatccgtatttctattgtcaggagtccatgcattcaatgtagacttcagcatatttgatttagagttcattccttcatagaaatatttgtttccgttatacaatttgaagttccatgcgctgccaagtacgattgaaaggtcaaatcctttatagccgaatgacagatttaagttcgcttccaatgtcgggatacctgagccacagtattctttgtcaccggcgtctatgcttccattaccatctaaatctttaaaacggatatcacctggttgggcattaggctgtaataattgtccatccttgtttacatgggcatttacttcatccatactttggaagataccgtctgttctataaagatagaatgcaccgataggtttgcctactctggtttctgtcgggaaatgctccgttccatatttcaatccttcgccctgaagaacttggtctgcatctgacaattcaaccaccttatttttggtggtgctcatattgaaaccgatattgtaatcaaagtcttttatagcatctccccagtttaattcaaattcgaaaccggtattgcgtatctttccgacattcagggtgggattagtcatacctgctgaaggaggtaaaacttttgttatcaacaggtcttctgtttggttatagtagtagtttaatgtaccggttaatttgctgttaaagaagccgaagtcgaaaccaatatttttggtatccgttgtttcccatttcaaagaacggttttccaatccgcgagcgatacttcctgcccatgcgttatcaccgttgcctttcacgtatccttgatacatttcattgtatgtactaatcagcgcaaggaagtcataatatcccaaagcattttcattacccaaacgtccccaactgacacgaaatttcaaattgttcagtgcaatgtctttcgggaagaattcttcctgactgattctccagcctaatgccactgacggaaagcagccccaacggttgtctttaccaaacttggatgaaccgtcataacgtacagttgcctgtaccagatagcggtcattataattatagttcagtcggccgaagaaagaagcgcggttatatttccattttgttccgctaccatcaaatgtgccacctgctcctgcacctacagttgagaaagatggatcaagaaatccgcccggagtttcactggttaccaattttccgtcttctactttataaacagtggttttaccttctaccccaacagaattccatgtatatttgcgagcagtcatggaagtacctgccattgcattgacgttgtgttttccaaatgtcttattaaaacttaatacattttcccatacatgttcttcccagtatcctgtggtttcgctatgataaggatagtcacgtttggcttttgggtcggcaacataagccggagtatgataagtctgacgctggtgttcacctctgtatgcatagcttgtcttgaaattcagccatggggtgaagttcatagtcaaggcaacattggctgtggtatgatattttttgtctgtagatttttcataatgctggtcagccataacattacggttactgggcaggtcatcaaagtcacttaagccgaagccatactctcttgtatcatcatagataggaacaagcggagaaatcatgtacatttctttaatggaatattccggttgtttgctatctgtaaatttgaaagcgatatttgcatctatatcaaagatatatttattcatatggagtttcagacgggcattgtcttggcgatagttgttacctagaaaaattcctttttcgtcggcatgattgtaggagagtgaatactgggcgttttcggaaccgccacggatactaaacatatagttttgtgaaacaccactccttagcatggcatcttgccagtctgtatctattcctgtgtttttatttacaaatgcaggcatagtaacctctgtatcattgggatactggttcatatagttctgatacatttgtttatgaacacttttgtattcttcggcatttagcagttccagcttttttgctacgcttgtaaagcttacataagtactgaaatcaattttcatgtcaccttttttaccgtttttggtagttacgataatgacaccatttgcagcaaccgaaccatagatagcagcggctgcaccatccttcagtacttccattgactgaatatcttgcggattcacattttcaatatcaccgggaaaaccatcaatgatataaagaggttggttatcaccaaacgttttgacaccacggattttaacctgcacacctgcaccggcattaccaccagccttcataatgtttacacctgcaatcttaccttgcaatgcttctgcagggttggttgtggtgcgctttaccaaatcgtctacatctactgaggaaatagcaccggtcatatcacttttcttcatggtaccatagcccactactacaacttcatccagcatctcagtatcttctttcaaagtcacccggatgtttgtctttccgtttacagggacttcttgtgttgcatagcccacataagaaataataatagtggctttgggggatacgcttaatgcaaagttaccgtcaaagtctgtgatgaccccgttggttgtacccttctctactacactggcaccaataataggttcgttggcagcatcagtaaccagaccagtcagttgaatcgtctgtgctaatgcaccgaaaggagtcataaaagcaaagagtagaatcaatagtatgattctttccttgaaataattctttttactcatgtgaataaattttaaggttaataattgtttttcacatcgctaagtaataggttgtatgtgcaaattcctaattattataccctacaaatgaactacaatgaataaaaaaactctcttttttaatctacaaatataaatgtaatatattgatatatagtgttctatataaagagataatatctacaaaatgctgtttaataaaaactataaaaatataggttctttaaatattttgtagatagtctgtcaagtcatcctccgaagataagtttagagatttacgtaaacgatatcgattcatgttgattgttttgggaacatttcctgtgagcattgagatttctttggtagatagatttacccgtaataaagtagctagatatttttctccttgtgttaaattaggatgccgttcggatagccgttgaaggaactcctggttcttttcttcaacattcatcagcaaggtgctgttcgttttatctccattctgatattggctgatgaaggcattgactttcttcagatgaggaatcaatgcttgttggtccatcttatatccttgctttatcatttctctgattttctctagcaattcattacggctatgcaggaatacagcaaaactggtagcttcctgacgactgttgtctaatgcactttggacagattttaattcgagttcttgctgtcgtactttaagttctgccaattcatgttccgattgctccagattatagcgggcaaccattaactgcatattctttttgcgtttataccattggtatagaaatatactgagtactatcaatgagatgaatatgattactagtacaaacagattccgtttcagcagttctattttataagcttgttctcttagttctgctttcctttgttggttttgatattgtttatgggaaatttcctgttctacgatgcgtaatttacttccactttgcaactctttgctgagagtatatagttgcatcaggcatttataagcgtttttatggtctccaagggcatcgtatacccaagataaatattcgtaattatcacaaatcagttctttggcactaatggaagaagcgacttcgtatgctttttgtaaagccatcaaagcattgttgtattgctttgcatagaagtattgctttcccatattgttatagttttcccctaatgaccattgagaattcaagttcttgttgatgacaatggcctcattaattaaacttagcttttcattaaaatcaccctcatataagcataaattattcaaattggcggatatccctcttaaatttttctgactgcggtttattgtaagggcttgtttaaggaattgttcagctgttttgaactcattcatggaataatggatgatgccacgatcattgtagcatagtgcgatagaaatggaatctccgatggatttaaaaattgagatggctttctcactcatttcgatcgctttgttgtagtcggtcagtttgcaatagagtgctcctatcagtgcgtaaatttgtccattcaactctttattggtaggagttgcatactccaaagcgtcatatagatttttaatgctcacatcaaaattgcctaatagcttttctgcctgactgtaatagaacattgcttcagctttttgatcattttgcctttcttcaggaaataattcaattaccttggcagcatagtaactagcctgcttcggattattgtataaggcatcaaccgactttttaatcagtgtctcggcttcttgttgcctattacgggcatgaacccatgaaaggttcaacaggcaaaggaggatatatataggtaggttgtttttcataatcaagcgtatttttgcaaaaatagtgattttctttgtaaaaagacactcttgtttctcttttaaaagaatatctttgcaagcaacaataaagatgaactatgttattaccttatttgaataaagacctgatagaagccggttgtgatgaggcgggtaggggatgtctggcaggatctgtatatgcagctgctgttattttacctgtagattttaagaatgaattgctgaatgattccaagcaactgacggagcatcagcgttatgtgctgcgagagattgtggaaagggaagcattggcatgggctgtaggtgtagtgactcctgaagagatagacgagataaatatccttaatgcgtcttttctggcaatgcatcgtgctgtggatcaattgaaaattcgtcctcaacatttattgattgatgggaatcgttttaaaaaatatcaggatttaccgcatactacagtggtaaaaggagatggaaaatatctgtctattgctgctgcatctattttggcgaaaacctatcgtgatgattatatgaatggtctgcataaagaatatcctttttatgattggaatagtaataaaggttatcctactaaaaagcatcgtgcggctattcgtgaatatggaacaacgccatatcatcggatgacttttaatttgttggggacagatccccaattagagattcctttctaatttaaagaatatataggaggatgggatgacttctttgcatttcattttacgttgttgaaaataaggcgaagaatctgtttgatccatatgggtagtaacagattcttcgtttcatttttttacaatggtctcatgcagcatatcaatatttccctcgctggtaagagcggtgtccataaatcgtaataaccacaaagcagataaatggcaggataaatgaaacatttacggctggcatattccaaatggtattcatatcaataatacttgcttgtaaaggaggaagtacggaacctcctaaaatagccataatcaggccggctgctccaaactttgcatcatctcccaatccggtaagcgctatgccatagattgtggggaacattaatgacatacaggctgaaacagctaccaggcagtacataccccagatatcctggaagaagatgactccggcggtgaagcaacaacccgcaatggcaagtatggccaataatttacctgggttgaggtagcgtaagatgaaggtacagacaaagcggctgatacagaaaataaccatcgcaatgatgttgtattcttgtgacagcacttcggcggctttttcttccataccttgtgacatgaacagatgtgtaccatattgaatgataaaggtccaacacataatttgcgcacctacatagaagaactgtgccacaactccctcacggtaatgatgaatggagaaaatacgtttcaaagtcggcccgaaattgatgccgtgggattggtcaccatttttaggcatcttagtaaaacggataatgagaaacatcacaaagatgacaataccgattgttaaataaggagcgatgagtacggaaagatccgcatctctcactattgcaaactccatcggattcagttgagctcgttctgccgtatccattggattcagctttgcctggataaagttcatggctacatacattcccaataaagaccccatgggattgaatgattgagccaagttgaggcgtcgggtagcggtagcttccgttcccatggacaagatataaggattagaactggtttcgaggaaagaaagtccacaagtcaggataaaataggctagtagaaacggataataattgccggtcattttggcggggaagaataataaggctcctacggcatagaggcctaaccctaacaggatgccagctttataagaatatttccggatgaacatagctgccggaaaagccatggcgaaatatccgccataaaaggcaacttgtaccaatgcgccatcggtaacactcatccgaaagattttcgagaacgctttcaccatcggattggtgatatcattggcgaatccccacagggcgaagcagcaggtgactaatataaatggtagcacgtagctgactccatctttgtgcaggatgggttgatctgtatctttcatttcttaaattaaagattgagaattaaaaattaagaaatgagaattgaaaacaaaaaaggataggcatataaccatttctcaatttttaattttcaattctcaatttattaactatttataaataggtccgtaagttgagcaagccctgtagtcagaaccttccttatccataccgaaagcattccatgatgccgggcggaaaatcttgtcgtcttctacattatgcatacaaacaggaatacgtagcatagatgccagagtaattaaatcctgtccgatgtgtccataactgatagcgccgtggttggctccccagttgttcattactgaatacacatcacggaatgcaggtttatcgcataggcggggtacaaaccaagtagtaggccatgtggggtctgtacgcatgttcagtacctgatggatttccggatcaatatctactgtccagccttctgccagttgcaataccgggcctaagccttttaccagattaagacgcatcatggtgacaggcataccgcctttagacaagaaattggaagagaaaccgcctccacggaaatagtcgcgatctgccggataccaagttgtagctttcagacaagcttctacatcggcttcagtcatttcccagttaggtttcatgcagggctctcccgcttcattatggctctcaccggtagcgtccagagtggttgcaccagaattgataagatggatgataccgtttttagccattccggtaagttctttgccggtaacacgtttcaccgcttcggggctccagtaagtacggatgtcggagaacatctgtccacaaccactcagcaggtgaccgaataacatggcaacaccattgcaagcatcattttcggtagccagaacgtatgcttcgcgaataccgttccagtcgaaagtggtgttaagcagtgcttcactgaagtcaccgtttggtttccagtcagtccattggcgttgtccctggaagccggctgcgatggcattatggccgatagcttcttctttgaatcccatttcaagcaatttcgggttgcccaccatcaagtcacgcatgatgatagtcatttttacaataaattcccagtcggcatccttctcttcacgggttttgcgcttttcgggacggttcttaaagtcttccccttcgttgggcttgcaatatttttcagtccaggccattgccttggcatattcttcatggtcatagattccttcttccatacggcgcaggatctcagtttcgtccacgctttcattacgtattcccagatattcctggaaaaagtcaggatcgacaatagagccggcgatacccatgcagacactaccgaaagaaagatagctttttccgcgcatattggctacagccatggcggcacgggcgaaacgcaatagtttctctgccacatcagccggaatcgtgttgtcatccaaatcttgtacatcgtgtccgtaaataccgaatgcaggcagccctttctgtgcgtgtccggctaatacggcagctaggtaaacggctcccggacgctctgtaccgttgaatccccagactgctttcggccagtgcgggtgcatatccattgtttcggagccatagcaccaacaactggttacggtaatggtcgcccctactccttcgcgttcgaatttctcggcacaagcagcgctttcggctacacgaccgatggtgctgtctgctattacacactctacggggcttccgtcaccgtttttcaagttggatgaaatcagttcggcaacagcttttgccaggttcatagtcttgtcttcaaggctttcgcggacaccaccctggcgaccgtcgatagtgggacgaatcccgattttaggatactttttcatgatatacataggttttagttattaaattgaatttcttaaatggactttcttaaatggacttcggtaggaagataagttcttatttcctgtccggttagcacaaattctgcggctttcctccccagctcttcccagttgatacttagtacggtgatcccttggtctattacctcgtaggcaggagtgtcattgtaggctatcagtccgaaatcttctccgcatttcagcccggtcgtccggctttgcttgattatattgactacctctatctgacggattgcaatgtacacttctcctttgcggacttgtatccggtctgtattttccacaatggctgaatcaatgtgataatcctgacagaaacaattgaaatactgacaactgctacgggggtgtttgatgtcttcgggaaataaaagtactagtctctgatattttctcaaatgttcttttaatgcggccaatgcatgataaaaggaatcgtcaaaatcctgacatacgtatgaataatcctttttatcgaacttcccgaaatccaacagcagtaacttagacgaatctattttgtaaagatggggggatagtttctcattgtcgaagttcatcacaatgtatttgttgtatctgcctattgattcacgtaagatggtattgaaaagtcgttcattatattgatgaaacaataaatctactttgtagttgatggatagttttttgataaaactattatataacgagtatttaaagggagaatactcgtccagcagaagcagaatgtttgtaagcttgttggtaacgtagtaaccttttcccggagtagagtctattattccccggtcttttaaatcaatgaatgctttgaatactgtatcccgcgatacttgatagtcacggctcagtttgttgatggacggtaatgtgcagtccgatctatatttgcccatggaaatctcctgactgagtaaatcagccagttgtttcactttagtggtctgctgtccaaaggtaactttcatgaactgtttaaggttttacacggacaatgcaaactgtgctgaactgtcccgatgcaaaggaatgcaatttattcataaacagcaagataaaatggtatgttttataacacaagaatcgatgcttctatatcgatttccggaagaatgtgtagtacgtactaatcaaataatataattagagtatttgccgaagtatattaaccgcattacagaacaaagggggatagtcgtgtcttgccggtgcgccggatattgttttgcaggtttgtgaaatgattgccgggcgtatgaatgcaaaattgactcgggatatggaatttaaagacggactgcattttatcatcaaacttcctttataaaaaataggtgaaacattattcattgacagggcttttttgtacctttgcacccggaaaaagcaaggataaactttaaacaaaataagattatgagtaaaaaagcccttttaatgattcttgatggttggggtatcggcgatcaaggtaaagacgatgtaatctttaacactcccactccttattgggattctctgttggcaaactatccgcactctgaattgcaggctagcggtgagaacgttggtttgcccgacggacagatgggtaactccgaagtaggacacttgaatatcggtgcaggacgtatcgtttaccaagacttggtaaagattaaccgtgcatgtgccggcaacagcataatgaagaatcccgagattgtttccgctttctcttacgcaaaggaaaatggcaagaatattcactttatgggattgacttcaaacggtggtgtacacagttcattcgatcatttgttcaaactttgcgatatctctaaagaatatggcattgaaaatacatttatccactgctttatggatggtcgtgacacagacccaaagagtggtaaaggctttatcgaacaactgactgcgcactgcgaaaaatcagccggtaaaatcgcttctatcgttggtcgcttctatgctatggaccgtgacaagcgttgggaacgtgtgaaagaagcatacgacctgttggttgaaggtaaaggaaagcaagccgccgatatggttcaggctatgcaggaatcatacgatgaaggtgttacagacgaattcatcaaaccgatcaataactctaccgtagacggtaccatcaaagaaggtgatgtggttatcttcttcaactatcgtaacgaccgtgccaaggaattgactgttgtgctgactcaacaggatatgccggaacaaggtatgcatactattccgggcttgcagttttattgcatgactccgtatgatgcatctttcaaaggtgttcatattctgttcgacaaggagaatgttcaaaatacattgggtgaatacctggctgctaacggtaagactcaactgcacatcgcagaaacagaaaagtatgctcacgtaactttcttcttcaatggtggtcgtgaaactccgtatgatgccgaagagcgtatcttggttccatctccgaaagtagctacttacgacttgaagcctgagatgagtgcttatgaagtgaaggataaattggtagaagctatcaagacccagaagttcgatttcattgttgtgaattacgctaatggtgatatggtaggccatacaggtatctatgaagctattgaaaaagcagtgaaggctattgacgagtgtgtaaaagatacagtggaagctgccaaagctaatgattatgaagtgattattattgccgaccacggtaatgccgaccatgcactgaacgaagatggtacacctaatacggctcactctttgaaccctgttccatttgtatatgtaacagagaacaagaatgccaaagtagaaaatggggtattggcagatgttgctccctctatcctgcacattctgggtatgcctcagcctgctgacatgaccggacgggatttaataaaataatgtaggaagtatatttatttgtcattctgaacaaggtgaggaatctgtaatgaagcatggattcgccactttgtccggaatgacattttaatttaataagagatgatacagatagatgatgttgtaatctcctttgatgtgtttcgtgagaaatttctttgtaatctcgatgcctgtaaaggtgagtgctgcatagaaggggatgccggcgcaccggtggaactagaggaagtggaaaagctagaggaggtgcttcctgttatttgggatgaactttcacccgaggcccgggcggtaattgataaacaaggagtggtttatacagatgaagaaggtgatttggtaacttctattgtcaatcataaagattgtgtatttacctgctatgatgagaaagggtactgttattgtgccattgagaaagccttccgggcaggtaagaccgatttctataagccaatctcttgtcatctttaccccatccgtataggtgattatggcccttacaaagcggtgaattaccatcgttgggatgtatgtaaagccgcagtgttattgggaaaaaaagagaaccttcctgtatacaagttcttaaaggaaccgttggtgcggaaatttggtgaagaatggtataaagagctggaggttgcggcagaagaattgaagaaaagaggaatgatttaagcatcttcgatttttatcattcctgatttattacattaaccgaaatttaatactacgaaaataccccatgaaaagactactcttgtcatgctgtattctattatgcgccgtttcgaccttgaaggcgcaagaacagccattaatcagtccggacgattctatccgtagtttggtgggacgtttgtttcctaatagcaatccgaatctttcggcacacatgaacctgcaattctctacttcgggagttgccaactttattgaaggagatttagaggatgcctcttttaaactgaatcgtgtgaaactggagatattaggttctttcagtaaacaattctcttatcatttccgtcagtcatttaataaatacagcaatcctcactcgttggacaacttatcctcttccattgagtatgctttggtgaattggaaaatgtctgaccggtttactttgaccgtcgggaaacaagacatcgctttgggtggttatgaatattatgttaatgccatcaaagtccgcgagtatagtgagtttaatgataacatcagttgctatcaggcaggagtagcgggaagattcaatctgtcatccaccaatgagttggtgcttcaggtagtaaataaccgtagtggagaaaatgatgaaacctatctttacggtttgccacaaggagtggaaaaagctaaagttcctgttctgtcaacagtcaattggaacgggttcttctttgataacgcggtacaattacgatatgcggcctcatacgggcagctggcagaaggcaagaatctttattgttttacggcgggtaatatttatgagaaaggccctgttattgcttatattgatttaatgtattctcgtgaaggactggatagcaaaggtattatcagtgatttgcaaggtcctgttttaatgactccatctacggcgcagaatgcagaatactttactacggtggtgaattttgactatcgtatccatcctaattggaatctttacctgaaaggtgcttatgaaacagcgggtatctataaaacaaacggaccttttgagaaaggactttatcgtactacatggaatgcgcaggcttgtgtggaatatttcccgatgcgtaatagtgaactgcttatttttgctcatcttttatataaagggtatcatttgacccggcgtgcgcaggctttgggaggtatgagtccggacacgcaacgtatttctatcgggttggtttactctattcccgttttttgatgttccctatcatatcttcactccgttccgtttgatatttcacatgggtgaagcaactgcttcacccatgtgacaacggctgtttacctaagtgaaatcgcctcttcaccaaggtgaagcaatgaacgcagccggacaaaaatacaagaaaaaaggcttaccctttcatttcaatgaggttgtttcctctttttattgcaagaccggggaaatgcgctatatttgtgaaataattaactacttcaactaacaacacagaatattataatgaaaaagactgtccttttttttctgatgactatattgatagcctcgtgccatcaagaagaaatcccttctgttcccgataaaccggaagggaaccagccgatttttgatttatcagatgaagatgtacttcagggttgtatttatgtgaaactgaaagaagaacctacagaagaggtgcaggtaaggagtattggcaacacggtaaggacaggaattaaggtgttggaccgggctgcctcttctttgaaaatagagagaatggaacgtacgtttccctacgccggcaaatttgaagaacgtactcgtaaggaggggcttcatttatggtacaatgtttggttctccaaagaaacatcagcgactcgtgcagctgctgaagtggcttttctagatggtattgaaatagctgttcctgttcctaaaatagtttccagggcaaggccggaaacagtatgggatatgtatggtgccagagtgggagagtggttgttcgatgatccgggtttatccaaacaatggtattttgataatcccggtacagaatcctggcagagggaaggtgcggatatccgtttgattgatgtgtggaaacaatacaatgggaatccgactattattgtagcggtcgtagatggcggcattaatcaggatcatcctgatttgcaggataatttatggacgaatccgggtgagataccagagaatggtatagatgatgatggcaatgggtatatagatgatgtacatggttataattttgtagatgataatgcaattttggtccctcatcgtcacggaactcatgtggcgggtaccattggtgcgacaaataataatggaacaggtatcagcagcattgcaggagggaacggaactcccggcagtggggtgaaacttatgagttgccagattttaaaaagtctgacttccactggaggagaagtcgcttctgatccgtttattgctgctgctattaaatatggtgctgataatggagctgttatcagtcagaatagttggggatacgctgtcggaacggggaggaatacctcttcatatattaatcctgtacataaggaagctattgattactttataaaatatgccggatgtgataacaacggagagcaacttgacggaagtccaatgaaaggagggattgtattgtttgcatcaggcaatgcgaatacttctgaccccaggatagcggcgccggctgattatgacaaggtagttgcggttgcagccattgaggccgattatagaaaggcttcttattccaattatggtacatatatggatatttctgctcccggaggagcattgaacggagatgggcggatatggagtacgaccacaaaactggccggtaattatgaatatctggccggtacatctatggcgtgtccgctggtcagcggtgtggcggcactggtgatagagaagtatggggtaggcaagaaagggtttacaccggaaactctgaaggaaatcctctatcaaagcgcatacgatttggatgaatataatccgaggtataccggccagttggggcacggatgcgtggatgccacagctgctttaaagatagatgtttctaatcttcatccttttacattgaagtccaatcaggtaactgataatactctgatatttagtgtaagcagcagtatggctggtaatggagaactgactttgtataatggcattggcaataaggtgctgagtcttcatttggaacttgaagccgcctccttgcattctgtggacataaccaagctttctgccggatattatacattggtgtaccgagcgaacgggatggagatcagagagaaatttatcaagtactaatcctgataaaatgaaataggacatgaaacgaataggactatatctgtttataataggcataacttttattaaagcttatggacaagaggattccggacctgtcaataccggagcggcaaactatctgactataccggttgatgcacgcagcgcagccatgggaggtgccggtgtggcgatttcgaggggaaataatgccgttttccataatggtgcggcaactttatcggaggccatgcacaaaggtggggttacgtatacttattccccgtggatgcgtgactatgagtctggatactctcttcatagtttaggcggtttttataaaattaataagcgcaatgccattctgttaggtttccgttatttcggctatccggagatggatggaataggggaggatgcttcgggaatacatcccaaagaaatagctgtggaggcaggttatgcatacgagctcataaagaatctttcggtttccgctacttttaaatatctgttttcggatatgggtaagataggaaatagcaacggtgcgagttctgtggcttttgatttggggatattatataagcgtgagataaaggattgggaaggtgccggttggtcggtcgggattcatgcgagtaatcttggaccgaaaataaaatacctaacctctaaagaggctcttcctgcaatggtcaaagtaggaggtgctgctgacttgccttttgcatcaatgcataggttgactttgaccgctgatctgggttacaggctttcccccgatgatgtacaggcgttaaatgtaagtgccggggcggaatatgcatggatggagcatctcatgttgcgtggcggttatcattatggtgataagaataaaggagatgccagttatgctacggccggggcaggagtggaatatgcaggtgtgcatttggattttgcgtggatgtttgcgggacatgaatgtcttgccagaaatacgttttggatttctttaggatactctttttaactcttgcacggttagtcctagaagcctatatacatatattaggcttctaggttatcggttattaacaggaagattatgagttatctttactttctttttgtagatgattggaatgcattcataatggctgtgggttttccgtttttgtcaaaggctcccatatcatatccgttccattcgtaacattccggttcccagtaccatacaccagcgcaagattccatgtctcgggctttgtttataaaatcggcaaggacttgggcggaagcggaatcattttgttttacccctatttcggttatcatgacttttacttggaaagtctttgctagttggctgatgtgttttaatgctaacaagttcatttcttgccataattttgtggaatgagtttgtggatagtgtgacaggccaatcatatccaattttcctccagcttctttgaactgcttgaaccaccaagttaagtcgtcccaggcattgtctatgtgaacaataacgatactttgggggaagattttttttacggcatcgtagccggtattgacaaactcggccagattttgtgtgttttgtggatatttcactcgctcattggtactgtttaagcctttgacatcacattctcggatatcatagaatgcaccgctgagtgcgacattctcatcccacaacattcctggacggatttcgttacccacttgtacccatcgtggggatatgtcttccgcttttaatgcttgcaagatgtcgatggtatgggcggcaatggccgtctttagttccgctactgatttgccgatccatgccttgggcttgaactgttgtccgggatcagcccatgagtcgctgtaatggaagtctaccatgacatccagaccttgttctttggctcgtcgggctttgttcacaacgtcttgtttaccgttccatctgtctttgggatttacccatacgcgcaggcggatggcatttatgcccagctctttcatcagttggaagcagtcggtttctatgccttcatgattgtaaaacttcaacccttttttttccatttcactcacccaactgatgtcggctccttgagtaaaactggttttggaaggtactggtgtatcggaattatctgttccggactgttcgttgccgtggcttccgcaagctgacgaggataataccagcaaagcggttagcatataattcttgaggttatgatatatttctttcatgtgttttcgtatattagttttttagaagatagacaacggaggcatatccgtctagttttaaataaaagtttccatgatcttccttctcctgtacatttccggatacggcgatagctttctccgtcctgtccgtcaagggaatctctatttcagaattgccaaaattatgaataaccaatagtttctcgctatctttagtcatgtaccaggcggcaatacttttgtattttttttctccctctcccgattcgttgaacagagcatgacgggtcatggttccttgggccagcgctggataggtgttacgcaatgcggtaaagatcaagtaggtattcaatactgactgatggtctgccgtctgtttggttacatcggggatgtttgtgcttactgtggcatctattttgtcggtatagtgggtggtataactgtctccccacaacataggtccgcgtacatattcatctcctttgtctttggtgccgtataatcctagttcttcaccataataaatataaggtgagccgggagtagtgagcaggacagcggctgctaatttctccttggcggtagatttacctagcttggaggctgcacgatcttcatcatggttgcttagtttggttgctgcgatgtacccgggacgataggcggcatattcttgcctatagttcaggatgtctttggtgaaataacatccggtggcattattgagagcccattccagacgataccagaaagagaactcgaacaaagcgggcagaccggcataatagggggctacttcgttgtattcggacagtacttcacccaccatgtagaaattgtccgtgtgtcctttttgcttgtaataagtgttcatgtcttcgtagaacatattcagaaaacggggattttcgttgctggtagcactgtggtagatgtgcttgacagcatccagccgcagtccgtccacacctcggtctatccatcctttggcactgtttgccatggctatgtacgcaggggaagaagtggcttgttccaccgcaccatagttgaggtcggcaaagtagtcggtggcaaactgggaatgataataccataagtttatggaatcgaacagaatatcggccgctgttttgttatcaagagtgaatgcagttcccaaagtgactttgtgggaagcagaagtagcaccgtatttagttcctgcaggccaagaaggatcgttactagtgcggattagaaatccccaagaggaaacgaagtctgtggtcagttcataatggttgttccctttgtcatagaattttttacatatgccttctccgaaataaaggtatttggctccgtttgtgccggggtcagggttgtccgcatcggctttttcggcccgggttactgtgacggtgggttgcgaggctttgctccagtcgaggctgaatgtatagatgccttttacttctgtatcttcggaggaggttgcgaaccattcattggcggcatattcttctttgggtatcatggctatttttccttctgctatctctgtttgaggagattgggagaagagatagtagctacgataaagattatcagtagatgaggtggcttccttgaaccaagggtgggctttgcccgtatggttcattacataatccaggtatatttttatgttgcgcttgtgggcttcggtgatgaggcggtcgaagtcggcctctgtacctagtttgggattgactttggtatggtctgtcacatcatagccgtgataggacatggcaggatggatgggggagagccagagggctgtcactccgaggctgttgatgtaatccagcttgtcaatgagtccgttgaggtcgccgtatttgtcaccgtctttgtctgcaaaggagtaaactaataattgataggagatgtcggcacgcttggtaccatcccaattgtcgggggcggcagtgatatttttccaagtggcggtaggaggatcagggttttcgggagtcggaggaaccggtatttccggcgaatcgtcagaacaggcttgtaacagaggtaccaagcaaagcaggaatagtatacctactagaaagagatggattcgtttcatggtttctttgtttataaggggtaaaagaataaggcggagtacagtattacggaaattccgcaagccgtaaaccgccttttgtcggtataggtacggggaggatacaagaagcgtacctatacttgtattgattagttcttagttagggtcaacaggttcatgccgtcgcattgagggatgaacctgatggtatagtttccggccgtaacagcgatgttgccggcattgaaagtcggttcggctatcgaaccaccccagttgatgtcccagtcattattggcgcggattttgatttcaccatccgttaggttggtggtcagattccaacttccatcttcttcgttgtaagtcatgtcggtatcggcatcccatccggatggggtggcgctacctatcactccgagagttgagatgagggtatgcttgtaagtcatggcagtcaaatccacttccatcatgtagaaccctgcttccggagcgtcgatatttcctgcaccgttttcatcaagtgtacctgccagagcatcaccacttactttttcccaatcgcctgtccagttatctttttctgggttcggcttgtatttgaattctccgttcaaataggcgaaacctctgtatttgccatcaaagtttattccggctagcgggcaagtacctgaccatgaggtgttattacctatttcatagatgtaaggagcgaaacccagctcttccagtgtgtaggtgtattccatcatatccaatgtcattctatacatgccggcttgggttatcatgccggcttgtggattgtttgttgtaagtgttccttcggtagcggtatctccatcggttacggttcccaatacaccagctccccagaattctccctcggtattggtcttcggaataattttccagcattgattatcagcggttgtggtgaatacgatggaaaatttggaatcttcataaacgtctgttcccgaatggctgaatcccaccatgccgtcagcgctccaaccatttaccgaggtttcatccttgtcgttctttattgtgaacatgtcgcctacaagatagtaaccggtgtcaataaatggtgcggccggagtgaaatttacgtcaaacgaaccggcatttaccaataaggcttgtccgtcttttatggcattggcatatacttgggcaatgaagggacgcgctataggacgtttcccgtaagtttccactaccagcttctgaatggtcaggctgtcaatcattccgtctgtattggattccagttctcctgccttacctttctcggtagagagctctacccgtacattgcccaaggtatatccttcgggaagtgtggcattagatagagtgaacaatttgatgctgctccccggattggataaattgatgtcatcgaccttggatgccgagaaatcgggaagggttattgcagcttcttgttcgttggcttgaggagttgcccaatcagtgtaatcatctgtgcatgaagacatgcacagaacagtcagaccgattaatgaatggattgatatatttttcatcttgattcaattaaaaagattattatttgatttcgccttcgccggtagcgaagttcaggtagagctgctgtcccgctttgcctgctactcgtgcttggtctccatcgttggcacgatattcaattttgccgtcgaagaccatgaactcgctcttccaccactcaaaggtaggaatttttacgtatgcacgcacaccgtcaccatcgccacccggaacactggcagcaaaagcaggtgagacaaaagaagcgttaaaagtatcgggaatggtacataaccagccttcagcctgctctttccagtcgctgttgcctacaacaggtcccatcaaccatatttcaggtttgttaaactgtatatcatagacgaggttgcgtcccgaaacggaagaggtgattaccattaagtaccatcccggagtatcagtagcgatattgtctccgttgtctttgatattgcctgccaaatcgccgtttatgctgtttataccagaaaatcctgtttcatttccatcccaagctttgctctgattgaatttgatgccggcatcgtctatccataccatagaccagaatacatgagttgcaccgtttacgggaatcatcttggttgccgaatcccagttccattcgttaaatccgcctacgatatataagttttcgggggtattgaccggaggaagcgagaaaagtaaatgtactttattcaatgacactacattggaaagtatttcggttccttctattgctttgttatcactggtcatcataactgctctcaagcggatatagaccgctatatccatcggaaaatcaacatcggttgcacctttgtttactttcatatctgtaagtgtactagctaaaagaggtgcgtctatactgatttttgttcctgcattgacattacctatttctgtaaaatcggtcatggattcatcgaatgccacttgcacatagtatccaacgttggcggggaagccgtagtcgggttgtgaacaggatatttcgatagaggaagaattggccaaatcgattactgtaccgctgatagctggagtgtttaggacaaattcggtgggtgagattagcgttgggttggagtcgcgatcatcatcacatgcggtgaatatacccagtcccaatccgataatcaaaaatgatttaagtattttattcattgtattttcatttaatatttataaaacaaaaagttttcagtatcccgggttctgagtcaaattggagttggcagtcaactcattggtcgggatggcaaaaatattaagatgtgcatcaaaactacgtccttcataagatccgcctttccattgccaagtgtaattgttgttgcctccatagcggttgaatctaattaagtccatacggcggcggccttcaaaatagaattctcggctccattcatcgcaaatatcatccaggctatatgcatttgtacgggtagaagcatgtgcacgacttcggatggagttaactgcttgtgtaccttcagatgtagtgtttcctccattcaagcgagcatcggcttctgcaaaagtcagataggcttctgcaacacgtagcaagaagtagtcggtatcggcgaaggtggcatcatgtccggctgaaccgtctgttttgaagttggtgaattttgcaatagcataaccgcttttaaaggtagatacatcttcattgtttaaggtacgtcccacaccgtcgaataaagcacggtcgtctttggctgctacatacatgtcgtagcttggcagttcgggggcatcattctgagggaagaatttgcggatgaggtcaggacgtgcgcggttaccgccccagttttgtgcagaaacaccgttggtggctgtcaggtcattagggtttgcatgcatctcaccatcaaagcaaccagctatcaagaacagggaagtaccccaactggtggttgtcagaccgtcttgaagtaagggtagaagagcttcgtaagcagcatcagtttccccgttgtcacccatgaataacatttgataggcagtccatccgccttttcccacagtattgagccggtaggaggattttattactttgtcggcatattcttttgctttttgccattgggccgttcctgtataaatttccgaattcaagtacaggcgtgagagcaacagccagcaggcagctttgtctacacgaccataaccggcatctgtcgatttttttgcttttgcttcggaaagggccggttctattccgatcagttcctgttcaagccattcatacatttgagctctggatctttgttcaggtttggtcattggttccaatgtaaagggtatgtttccccaaccatccatcagtaagaagtagtgtagggcacgtacaaagcggatttcggcagacatggtggcatctgtatctccagccatagccagatattggttacaataggtgatgccggtagtcagacgggcatagaacccgtttaacataggatgggaagcattgtaagtattgtagcagaaactggctacaccttcatctccccagccgcagatagcttcatcagtggtcagttcgttggaattgaacaattggcggataaagcctgtcgtaccaccatccaaaccgtcaatatcacagtcaccgttagcaccaccgtttccggctaatgccatattggcgtagcacttgttgaacaatccgtttaaatcaacattggtatcgatgttcggatcgataggatctacatctaagtctccgatacatgaggttgcccccaaagccaacatcatgaatgtggcaggaacgatattctttatgtattttttcatatactgcataattttgcgaattagaaattcaggttaagaccaataataaatgagataggacgcggatagagattgttatcgaatccgttattgatttcggggtcgatgccatcatagtttgaaatggtgaaaacattcgatacggttccatatacgcgtccattcaaaccgcgatagcttccgttcttgaagagattggaaaagctgtatcctaaagtgatgttgtcacacttcaagaatgaggcgttacgcacccagtagtccgaagctttggcggtaatttcgtaagtttgccaatttctggctacagcgtctaccggacggttagacaggtaattcaaagagttggaccatacttcaccaggattcatgttgctccatccggcgttgattccatcataaacatagttacctagactggcacgcagtgagaatccgaagtcccaatttttgtattccaggcgggaggaaagccccatagttacgtcgggagcagcatttttataaaggtatttgtcattttcggtaatcttaccgtcaccgtcccggtctactactgcattttctatcgggttgccttgtgggtcatatacttgttggtatacatagaatgaattagctggataccctacttgattgtattgcagataaaaacccgaaccttgacctactttgatatcggtattggctacaggagcaccactatcggatacaccacttagatcggtaatctcattcttattataagtaaggttataattaatagtccatattaagtcattgtttacaatgggtttccagtctaaggcaaattcgatgcctttattttccaacgaaccgatattttgccatgcttgatttctatagccggccatggacgctaatggtgcatagttcagcaaatcttcggttttacggtaataagcatcaacactggctgtcagccgttgatccataataccaaaatcaaccccaatattataggtagtagtggtttcccattttaaatcaggagtatagttgtccgggcggtatagggttccgttacctatcagtggataaaaaccgttagtacctgtgcttactgagtatgtgggaatccagttataattgttaattttttctcctgcctgttgacctgtcatgccccagcctaagcgaagtttcaagtcagatatccaagatatgtcttttaggaagttttcttcttttgctttccaagctaaggctacagacgggaaccacgcccaatggtctttgaagcgtgaagttccatcatcgcgaacggtagctgtaagatagtaacggttcataagtatgtagttggcacgtccgaagaaggaaaccaaataactgtcggtcttgtattgatacggagtgtgaggacgctctgtgccggctaatgtggggtcatcgttcgtcatcggataacgacctacgtagtcactgtttgtgcttttccaaaaatgttgccattcgtaacctcccataatatcaaaatggtggttatcattaaagtctttataatattgggcgtatgcattcaatgaaaggttgcgttttaggatactttcacctccaacagaaccataatacatggcactaggggaagcagtagatttattctgtgcttggcgtcctttggaaacatcggcacctagagataaatgaaggcgaaggtcttcaagaccatgtactttatagtcgatatcggcacttcccacaaaggcgcggctgtgggcaatttctgtgttaaaagcaagcatggctaatgggttggcacattctaccgtgctgttatagatgaacggccatgtggagtcgcctaatgatgcggccgatgaccattggaaaaatcccccataattttgtaatgtctgatccaatgcattgccgaattgggctttgtgatattcggatgtgaaattataaggatcttgggtagggtccatctttacagcagcacctacggctccaccgtcggcatatgcagaacgtgcgtacattcctttcgcattgaggttcatagtcaaatgatcgtcaaaaaaagacggattaagattcaatgcagctgtgacacgtttgaaatcagaatttttcaagataccttcttgattggtgaaacctacagatacacgataaggaaggtcttttactgcacccgatacggttatattgtggtcatgactgagagcggtacggtaaataagatcttgccagtcggtgttggctgtacccatggcacgataagcatcgctgttttctccgtataaatcggtgataagttgacggtattggttgctgtcaagtacatcaactgttccttttttctgactcaatgtgacactacctgaataggaaactgaaggcttttgccctttgcgtccctttttagtagtgatgatgataacaccgtttgagccgcgtgaaccgtagatagcagtggctgaagcgtcttttaatacgttgaatgattcgatatcctgcggattaatcatggctagtttgttagagaggccttttactccctcattgtccatagccataccatcaataacaattagagggtcattagatgcgttcagtgaagaaccgccacgtatacgaatctgggcgccactgcctggggcaccatcattacttgttacattgacaccggctattttcccagaaatcatatcctgtgcgtttattactaagcctttgttctttccatccggtttcatggctgttaccgaaccggtcaggtcattctttttagccacaccataaccgataacgactacttcttccaaagtttccgtatcatctttcagtatcacatttagtgaagtagcagccggaagttcctgggtcaggtatccgataaacgaaataacaattatatcacctttattggcgtttaacaggaagttaccgtcaaaatcagtgatagtaccattggttgttccttttaccacaacattggcaccgataattggttcgcctgttgtgtcctttacaagtcctttgacagtcatttgttgggcaaatgcgtctatggacaagaagcatcctactatcagtgtgagtaggatcttgaacatcaagtttcttttcatgtctttaaatttaaagttaaataattatttcaagtttatattctcagctaaaaacacctattgaaaactgttttcccaaacaatcagattatttatggctcctttaatccttatatttctaatggaattgatctttctttaaaaccattgaattttttctgaaaattttgtgatatctgttcaactggatattgagagagttgaaacatgtatttgttttttagatttattgagatagaatgagttctctatatttctgtttattgaaataaatttcaaaaaagtatctgcaaaaaatgatttgtaatgagatacaataggggaaaaattctttttggttttcatgatttaatggtatttagttttaggttaacggttatcctcactttattttgttttggatgttgcaaatgtagctttcttgtaaattgattctttatctaagaataaaaatataaatgatttaaatcaattgtattttataagtgtttgatttatagaatgatgtgtcttttttgtatctgaaaaaatataaatgattgtgaactgtttcgtgtttggacaagaatgatttatggttcttttatattaattctttgtcaaaactttagtttatattgcatcagctaagagttttctataaaaaacttttaaccgatgcaatataaaggaataaacttaaaagtagttttatttgttttttacaacaatgattttgggagttaccttgttgaaataccacttgatggtatagttaccggcttctgaaactttaaaattaccatcaccggcatcttcaaactctccttctacagctccgggagctatatcgtcttcccatttctcttcagggcgtattttccatttattaccggcgggcatatctagggtagcttttaaataatattgaaatttgttgttttcatccgtttcagtttccagtgtcatcattgtgtcaccgcttccccagctattgtggtctcctacaattccccatgagttgtgaggtttggaaactttcaattctcctgtggtattattgaattctaaataataactgtttttgctgtatgctttaatgtcccctccattaccggatactaaagtaacgagggattgttcgggtgtcatactttccggagctccccaattgtccgtaccccagtcttccgtaccgcagaatttccaaccatcggctgctttgccgtcgaagtacaccatagcggtgtatatattatcagaatttaccgaatatactttttggcttttggtgaaatcccaaccattataacttccacggagtgtgattgccggatattccggctcaccttcatatggagtgatggtggttgagacaatgttggaatacaatgtatcggcagctgctgagatagaagacgatatccgaaattcgattcctgtcggcgctgtctctatttcatagactttcagcagggtcatgattttgctgttcaggtcactgacagtgatagtatgtgataaatctgttttggatgaggctaaaattactttattggcaaaatttttgtctttaacatccatttccaacgcattgataacgcttgcttgatagcctaaatccggatagctccaggtaagggtgaatgcctcttgggaagcattttttgattccagtatataactgtcattcaaggatgacagggtagacgggatggcattttccgaactatatgtcacttgttccaaatcactttcacaagcagtacaaagtaatagggtaaaaatagaagttgatatgctttttatgaatttcatgatgatgtacttattgattaataaccttcattttgttgtaagttaccgtttacggtcaggtcggtaacaggtataggatacacgttatatctcttgttcactcctactccggtattgattcctcctttgaaatcccatgtataggagccggaagtaagcagatcgaaacgtactaaatctgtacggcggataccttcccaatataattcacgcccgcgttcatctaacaaattacggaaattattttcctctaaccaattttcggaaatgttgtgtttttcatctccataggcacgcttgcgaagggcgttgatatattcaacagcactagccttacttccttctccaccgcgtgctacggcttctgcatacatcaggtaaatatctcccaaacggaacatcggaaaatcagtatctacccataatgtattttttcccggttgtccgttgctgtctaaattgctgaatttgaatacactccatccttcagtttcaaaagttccggatacactggaagtaatgtcgatagagcgtcctttatcataaaaaataccacgtttatcttgaatctcagaagctttgggttcttcatcattttgaaaatcaaagagatgaaccagattgcttgttgcgcggaatcctgcccagccttggtctaccccactgtgtgctagtaaaacatctttgtcttcagctcctctggctccgatgataatggcagccataccccatgattgggtcttgtccccatcaaagatgataggatagattatttcttttttggtatccggattctcgccattgtctgctttgaataaatcagcatagttgtctgccagttgataccctgctttgatcacttcgttgcatgcattaatacattcgctatatcgtgccttaccggtgtaaacttctgcattaagatacatgcgtgctaataaagaactggcaacagcttgatctgctactccgtattcggagcgtggagagggcagattgggtttgatttcgtttagttctgcttctatccaattgaacaggtcttctctagacagcggggcaggttctatggaataattcttttcagtgatgaatggaggcaatgcaaacatatccatcaagatataataggcaaaagcacggttaaagcgggcttgtgcaatataactttctttgtcaatgctttcgggcgcgttgggaatgttctttaagaactcatttaccagtgccactatatacatgcagcgttgataaaccccttcaatgggttccactttattggtagtccatgtcatatagtttacttctgtgcaccatgcatcattccatgcgttcttcatttcatcggttggctgttcttgtaaagtccaccaacagcgtaatagtgcagtatttcctgcatcaaggcctgaaatatctgaactgctgctgccgtcttgtccggataacgcccaaactgagtatattttatgaagtcctttagtgtagctttccgcatcggtataagctttgtctgctgtttccactgtgggatccaaaggtaagacatccaaatcattgagacaacttgaaaaaacaaacaggcaagttgccagagttgtatagatatattttcttgttttcatacgtaattctcattaaaagttaagattcaaacctatagtgtatgtgcggggacgtggccagatgttagaatctatcgctccacattccgggtctaatccgctatattttgagatagtaaatacattttggacagatgcgctgatacgtcctgatagtttggctgcaaacagattttggaaagaatagcctaatgtaaggttgtccatcttcaagaatgaagcattttccagaaaatagtcgctggccatttgttcgctggtattcagcaaggtaaagcctgtatcttgaaaaccgttataaagatttgtaataaatccttttccaccataattgttggaagtgctattgcctgatgccacgccattgtatacataattgccaaagttagcacggagattaaagcccagatcccattttttgtagctgaactgagaactgaaacccatatatactttagccatcggacttttgtgggttagataacggtcggcttcggtaatttgtccgtcattgtttcggtctacaaatgcattttggataggcttgccgttttcatcgtatacttgttggtataaatagaatgttccaggcatttcacctacttggtgtttttggtttgtgccggcatcaataccttggtagtcgggattgaaagtggtagtcagcttggtaatcttgctatcattccaagtgatattatagcctacctcccatgtgaagtctttgctttggatagctatggcatttacattggcttccacacctttatttttcattttacctacattagcggtaatcaagttgataaaattcgttcccgctgcggcactgatggtgtttaacaagtcttttgtatgtttctgataatattcaatactaccgttgatacggttatttaagaatccgaagtcgatggctacattgtatgtagttgtttgttcccattttaaatcaggactgtaaccgtttggcttcaaaagcgtagttcctaaataggttgtattaggattagtgctgaatgaataggatgtgatatattgataatctccaatttcctgttgtccggtcacaccatatcctaagcgtaattttaatttggaaagcacattttctgtagctttcataaagggttcattactgatggtccaagctaaggcggctgaagggaaaagtccccaacgattgttttcactgaatcgtgaagaaccgtcacgacgtaaagtggcagtcagcaaatagcggtccatgaaattgtaatttaaacgcccgaagaatgaaataagatagttttcatacggaatgcgacggtggtcatcacggatgtaatgccgttcgttttcgtcataggtatatccttcttttgcacctaagtcttctgtagggtttgaataggtgatatcatgattggcataatagaaatgttgccaggaataacctgccattatatcgaaattacttttgatggattctatgttttttgcatagttcatgtagaagtccagcaggtggttacgacgcagattgtttcaagtattgccttgtcctaaaccggtgaatgttttatctagtgagctttgaaccgaattggaatttacaaaattacgaccggttgtttttgccacgtcatagcctaaattcaagttggcatgtaagtcttccagaccatgtattttatagtccaattgaatattacccaaactacgtttggttgtaccgtgattgtttctatcgtataataaagacaatggattctgagtcgccagatcggcttgtgctccttgtactattccccagttccaatagccattatatcggttttcttcatcgtaaatgggtttggtggggtcaaagaaagcagcggcacctacagcaccggaatctgcaaatcggtttttattgatggtgccttttacattgatgtctacactcaggtggttgtcgaaaaatttaggacttagattgacagcaccggtataacgttcatatttagaagtctttagtgtacctttttctgtattataacctaaagagagacggaaaggcataaatcctgcttttcctgcaattccgatgttttggtctgtacttaatcctgtctggtaaatagcatcttgccaatcggtgctttggttagggtatacgttcagaatccgttggatatccgccgactgtgcggttccttccggatattgagcctgcattacttcgcggaatgattgtgcgtccaatgtctctatacgtttataagggtcttttgccgtgaaagttcctgagtagctaacttttattttgtcttgtgtcccttttttagtttggatgataataactccattcgaagcgcgtgaaccgtaaatggctgtcgccgaagcatctttcaaaacagtgaaagtttcaatatcattgggattaatggtggcaagtgcattgggagtgcctggagcggcatcatttgaaacaggaattccatcgataacaataagtggatcattgctggcatttagtgatgcaccgccacggatacgaattgtcgaaccggcaccaggggcaccgtcaccttgactaacagaaagtcccggaactttacccataatcagttcttgaggagaagtaacagcacctttgttcatctcttctgctttgatagctaccacagaaccgcttaggtcatcttttttcacagaaccgtatccaatgacaaccacttcatccagaagttctgtatcatcttttaatataatattcatagaagcggctgcctgtgcttcttgagaccgatatccgataaacgaaatgatgataatgtcacctttattggcgtttaacaggaagttgccatcaaaatcggtgatggtaccattagtcgttccttttactataacattagccccgataattggttcacctgtagtatctttgacaattcctttgacaactatttgttgggcaaatgtgttgacggacaagaataatcccacaatgaacatcagtaggactttaaacgtggcgtttcttttcatgtctttgtatataaatgctttaatattattcattttatttggaaaaatacctattgaaaactattcaacctttttacttgcttttctataacctcttaataccttttaattctgatttatcttttacctctttaatgctgattgcataaccaccaccgcttgctgcgtgtaagttcagtttgcttttgttggtcacaatgcctttacggatggtatatgcctgcggattatctttccagtcggcatcttttgcgtctgcatatacagttgcgatgtattttttgtccggatcaaggaaatcaaatatcagttttgaagaatgaccgttctcatctgccgtacagccgatataccagtcgttggttcctttagctttgcgggcaatggtaatatagtctcccggttcggcttccagatatttggtttcatcccagtcaatggctacatcttttatgaattggaaggcatccatgaagcgttcatagttttcaggtatgtcagcagccatttgtaatgggctgtacattgttacatacagggccagttgacgtgccaaagtagaacgtacctgtgaattgttggtaggattcattttgttacaacgggtttcaaagatacccggagtgtagtccatcggaccacctattaatcgtgtgaaaggcaagatggtagtatggtttacgttgttaccgccaaatgactcatattcagttccgcgtgctgattcgttaccgatcaggttgggataggtgcggcatattccggtagggcgtacagcttcgtgggcgtttaccatgattttgtagtccgctgcttttttcaccgcatatagataatggttatccatccattgtccatagtggtgctcaccacgtggaataatgttgcctacatagccactttttacagaattatatccgttgtctgccatgaattggtatgcctggtccatgtggcgttcatagttacgtacagaagccgaagtttcatgatgcatcatcagttttacacctttgcttgcagcgtaactttgaagttctttaacattaaagtcgggatagggagttacaaaatcaaaaacataatctttgctttttccgaaccagtcttcccaaccttcgttccagccttctaccaatacttggtcgaatccatgctccgctgcaaaatcaatgtaacgttttacgttggcggtgttggcagagtgtttgccgttaggttttgttttgttgtaatctgtttcacctagttttacactggataagtcatctgtgtaagcccatgagccttttcccgtaatcatatcccaccacacgccgatgtatttcacaggcttgatccaggaagtgtctgctattttgcaaggttcgttcaggtttaacgtaatgcgtgaggcaagaatgttgcgggcatcatcactaacgatgacggtacgccatggtgaagtgcagggagtctgcatatatcctttgtcaccttgtgcgtccggagtcagccatgattcgaaaatcatgttcttgtcatccagattgaggtgcatacaggcatagtctatcaaagcagcttcgtgcagattgatgtacagaccatcgtctgttttcatcatcagggcagtttgtacaccggtggggctgaatgctgtttgcgaggagttctccgtataagcctttgaaaacaatcctctgatttccgacaggcgggaaacggtatagtcatattcctgtgtatcgtaatctcccggaatccagtaagcagtgtggtcacctgccatagcaaattgtgaatgttcttctttgatcacgaaatagtttaagttcttctgctgcggaaattcatagcggaaacccagaccgtcgttgaataggcggaaacggatgattataaatctgtcattggcaggctggttcaatgtgaccgccaattcattataatggttacggatttccttttcttctccccataccggttgccatgtttcatcgttggtagatgtctggacatcctttagctcgaaaccgttataaaggtttgtcttgatgtccagtttgtctatgtcttttttatcagtccattcgaagtcggttttggcgtttgcgtcttccttctttaattccaatcccaatctactgggtttgataacttccttctgtttataggtcagttcatacgtaggagtgccctgaccatctagggtaaatgtcatctccagattgccatccggagagctcagtttctgttgtgcattcgcaatgaatgagatacagagaaatgcgataagtgaaagattcttttttaatttcataatatgtactggtattaaattataagcttttactgattgttttaaaattctagaactagcattccacgccccgggagtgttaagtttttactcaagtcgatacttttatccgttaaaacatcatgggctgatgttgttggaagtacttctttgtatggagtcaggttaatggtttgcgttttgtctgttccattcatgagaaccgttatcgatttgtttccatattttcgttcataaacgtaaatccctttgttgggagcgaagtgtttcaatctgcctttggctatgatttcattaccttttctccattggagtagtttctgcatataagtaaaggcttcattttgctgcggagtacggttagcctcattgaaacagttgcgtgagtcatttttccaacctccggggaaatcacaacgtaacagaccgtcgccattggctttatctgcagccatcagaatttctgtcccataataaatctggggaatgccacgtgtagtcagcaggaatacaagtgcttgtttgtagcggtcaatattttgcgtggcttcttcatttaaataaaagcgtgaagtatcatggttatcaaggaaaacgagcagattcattggatctgcatataccaaatcctgagtaagataatcgtaaagacgatataatccgccattccagtcagttgtttcttcgtcaaaggctttgttcatttgttccatcagcgggaaatccatcacggtacggagattggaatttctgggagcagccagtctgctgtctttctgccagaaagaaactagcacattactgttcaaccaagtttcacctactatgttgaaatcagggtactcatcggtcacggctttacaccattctgacatcatgtcgaaatctgcgtaagggtgtgtgtcttgacggatgccgttaatccctgcatattctatccaccagatactgctttggatcaaatagcgggctacatggcggttgcgttggtttaagtcgggcattgattctgtaaaccatccgtctacggctatcttgcgttcataatcagaagcgtggatatcctgtacgctcgctgttttataagaagtttgtgtgtagtttcctttaaaattgaaccagtctttggaaggcatatctttgaaaagatagttttcgctgccacaatggttgaaaatcatatccataacaactttcattcctttactgtgtgcttgttctaccagcttgcagaattcttcattgctgcctaatctgcggtctacttgataataatcggtaatggcatagccatgataggatccttctttcatgtcattttcctgtatggggttcagccagattgccgtaactcccaagttggagagataatccagattattttcaatacctgcgaggtcgcccccgtgacgggcgaacggatcgttgcggtctacctttacttccaacatttccggtacgacatcgttcgagggatttccgttggcgaagcggtctggcataatcagatataatacgtcacccgagttgaagccttccacgttggaagcatctgccttacgctgttttatttcatatggcacaacagtttgctttttaccttgtttcaatgtaatatgaaaagtctgcggagtagcttccgataaatccatatataagattaggtaattgggattttcttgtttcacaacatctttcagaagaatgtctttagaagagatgcttacatcactggaggaaatattgtcgccatacagtaggatctgtagttcgggattcttcatatccgcccaccagaaggttggggctacttttttaattatggctgcggacactgtgtgttgcaaaccgaataacgcgagtaatgccataagtgcgaatgttcttttcataatatatagaaattagtgtttatatcttcatttcatttggatgttgcaaatgtaggagtggaatagatgagatttgagtactagaataaaaatataaatgttttatagactcaacttattgataactaggtgtatttatctctgctgtattgctgaaaatataaacgtcaatgaaaatattttcgttgaaaaactttattctaattacttatatttatatatttgtgaatctataataagtatataagatgaagaatgtaacctatttctttatattgtttttgttgattttgacacctcctttgtttgctgataaaaacagcaatgaagaagtgttgaaaaggttggatcggatcattgataataagaccgcttatcatgtgcagaaggaaaaagagattgtggatttaaagcaacgtcttcaccgttctaaagataatagggagaaatatgaactttgcggttctttgtttaacgcttatctgcattatcaagctgattccgcattgtattatattaatggaaaaatgaatttgttgcctctgttgaatcatccggagttaaagaatgagattgtcattaaccgtgccgaggtgatgggggtgatgggaatgtataacgaggctttggaacaattggagcgggtagacccgttggaattggaacgggaaactttggcttattattaccggacctatcgggcttattatggttgggtggccgattataccaccaatgatgccgaaaaagtgaaatatttgaaaaagaccgatgcttacagggattctattcttattgctactgatccttgtgtagacaggagcattgtatgggccgagaaaaagattattaatgggagggtggattctgctttggttatattgtcggacctattgaaagaaacgccggatgaacggcaaaaagggtatatttactatactttatccgaggcttacgatatgcggggagatattcagaaagaaatttattatctggccttgaccgctattacagatttgaaatcgtctattcgtgaatatgcatccttacagaaattggctcaactgatgtatgaggtaggtgatttggaccgtgcctataagtatttgaattgttcaatggaggatgcggtagcttgtaatgcccgtttgcggtttattgaggtaacgcagttctttcctattattgataaagcatataaattgaaagaagaaagagagaggcagatttcccgtactcttttaatcagtgtcagcttactttctttatttttgcttgctgctattttttatctgtaccgatggatgaagaaattatcagtgatgcgccgtaatctgagtatggctaatcaacagatgcaggaagtaaatgctgaattggcacagacggggaagatcaaggaagtatatattgcccgttatttggacaaatgtgtgatttatctggacaagttggagttttatcgtcgttctttggcgaaactggcaatggcctcccgtatagacgatttgtttaaagcgattaaatctgagcagtttatacgagatgaacggaaggatttttataatgagtttgataagtctttcctggagttatttcctcatttcattacttcttttaatgagttattggtagaggaaggaagaatatatccaaaatcgggcgagttgctgactacggaattgcgtatatttgctttgatccgtctgggagtaactgatagtaatcggattgcccatttcttggggtattctttggcaacgatttataattatcgcagcaagatgcgtaataaggcgataggaaacaaggaaacttttgaacaggaagtgatgaacttatagagatagggggacttttaattataattgtaatgtgaattagagaaacaatgaggcttaaatcgatataacgagagttttcatccagatattcgataaatcggattacatccgctatattcatcctttttttatacagaaagagagaaatatattgcaatactcattataaatactcgtagcgaaaatgtcggtatcgtctgttcccactacattaggtggaacaggatatccttctttttcccagcaataccaattatatagatgaaatgctttatctcgtctttttcgaaagctttggcataggtgcattcgtttagtatgattttaactttttcattttgtggatacaggttccatgatattcgataggggtataaggtgtttttttatgaaatcaaaaactctatttttagggctttttcgattcaaataaattaaaaaaagcgagaaaaggagtattccggtatgcggaaacccttttcctcgcctagaaaaaattgtttatcttggataaaagtcacttctcgttaaagagaagtgaacttttattttcgattttacttaccagtgttcaaagttgtcttgatgtcaacagaactgttcaatgtgtagccccagatatcatctacagcaactttcaacttggctgtattttcagtaacgccttctacctcaatataagaatctacagcaggagcagtggctgttgcagctactggaacagtcggagtcgctactgttacttcaaatacattcttgttaccagtagagaatgttacgttggcaatatcactacgataccattcaataacacctgctgcttcacctttagcaaagatatcatatttcacatcgttgttataagtcttagcccagatgttttctttgtacagttttgttctacctgttgcagaaacttcaactacattattggcagctacggcctcaccttcaaggatcggagacattacacggaactggtaggtcttggcatatttccaagaatcatctcctgttacatccagataagcaccggtaaacttaacattcaaatctttcttataacctgccacatctctgcttccgtttccatccgtgtcttctttcaagctgacatgagcacggttggtagaagaaggtacagggttaacgatagaagcaaagtaacttgctttctttcctgtatccttgccttccgcatccaatacattattagcatcgtctattgcaaaagtaggactggtaaccatcttggcgtcagacaatttcttctgcatatcagtaaatgctctgtcaatgtaatagttggactgatagtaagatttgcctgttaccttagtttcagcatcaccccagtacatgtatgcttgagccaaatccttaccatcacggaatacaccgctttccttaaccaaaatagtattcaattctggcttggtcagttcgaacggaacaactacatagttcaactcaatattagaagtcttgtctacgaatgacagtttagcgtaataagtctttccaatcttcaatggtttaacagtcttgtttatatctaactggaatttcaagtaattcaatttagtagcaatgttagcaggtgtaacctgattgtcattgtccacattcattgtaacagccacctgcttgttattcatattagtagtagcgccaccgtttgttcccaaatcagatatcactgtacaagcttcatcgtcataaatgttttgaagtacatttacatctgtcttaacagaagcataccatgcgttcaggtcgctgctcaaagacgctttcaacttgtcagcagataccaagaatgaatagttggtcttattaggctgtttagtttgcttgtcataagtcgcttcacccaaagttctgttgatttctactcggatagtagtcttcttgatattgctgttaccaccgatattgggtaacgtataaacttccaaatcgatagtagcatctgttacattatctgggctcttagtagctttaaatgatctaccgtcttcactgaatataattccaaacaaagctttatcttcttcagaagcagaaagatacatatcatataggttacattcttttgtaactgacacgacaacttcctgacccactttagtctgataagcaacccctgtagttctatcgactccaacaattgtaacataatttccattcaaattgatgttagtcagaggagctgtagtctgtttatctggtatgacttttacattaaacaatgatctatagttagcagtagcaggtttcaatgccatagccttgttggctcctgatgacaagaattggttggctaatttgttggcatcaccaccatccgcataagatccaggaacaactgttatatcatacaaaccattttctgccgctcttgtcaacataccgtcatattttttagcagccaatgcaatagaagctacattatcctttgtatcaatcaaactaaatgcaagctcagaagcatctacagaagaaggggcaatgcgagtgtacaatacattgttatttcctgacaaatctgtagaataggtagttatgttattggatatattacctctaggccctttccattctgtagttgccgcagcatcccagtaaagaagagttatttcattaaggtttttaattgcttggtaattgttatccaagaactcaatgctagaaatagcagaagccgcagtaggcaatttgatagtctgcatcacaccatttgcatccggcatgtacaatgtaaacacgccaccgtcatttacagcataagcagcaccggtagctttataaggagatttttctgcctcacctttatcattataaaaataccagtaaccatcttcttcgttaatgtaaggtactttcacctctttcaggtcttcggaagtaacagctaagtaatcggttttttcaccgtcaatgtaccaataaccgtctttcactgtcacttcggtaccttttccgtcttcacctttgtcacctttctcaccatccttaccatttacaatggtataagttttgccatctttgaaaactacggtaaaaccaccttcagtaggtgtcacgctagtaacccagttaccgttggctacttctgtttgtaaagctgcaatttgtgacttcagatcgttcaacgtattgtcgatacgatcaatgtcatcatcgtagtctttacaagacacaaatgttcctgttgacgaaaccattaaggctccgaacaggattgcacttaaaaactttttgttcataatagaaaaactttaaatttataaatttaaaaaactaaaattggttatacataccatttattataaaaggacttaattgttttcctcctgtttcagcggattcctctcgtgtgccacatactgccggggcgtcatgcccgtcacttttccgaacgccacatagaaagggcttttcgaaccgaagccgctgcgtacgggaacttcctctatggggcatcgtccgctgcggagcagctctttggcgtattccactcggtaagtgtttactagttctttcaggttgcagccgaaatagcggttcaccacattacttaaataagtctggtttgtctccagcatcgcactcagtgtcttcagcgaaagagaggaatcgaggaatacttgacgcacttccatcaggtataatatacctttatatataagagcatctatccggcggacgtccgtccgcaacgcaaactccttctcccatcggcgagaggcggcacgatagagcaaagtcttttggcgcaccgaagtgtagcgggtctttttacgtcgcagaaacaggtattccattcaattcttttttcgtttttttatttgcttattttgtcgatctcttagtaagagatcgacaaaatagatgtaatatgcataaaatcaaataattaaatcaatgagaagtgggctgttgagagaaagattaaataagaaaaccttaattccgcaacactattacaaatataactttttaagtacctgagcaacaaaaagttgctcaggaatttgccatgtcagatttttcacctatcttagtgttgcaaatcaaaatatgtatcaaacccgacagacatggcaaaggtagcaattaaatccgagaaactcactccttttggaggaatattttcaataatggagcaatttgactccagactctcatctgtaatcgactcaaccctcggtatgagatgcaggctgtatggttatcaatacagcgaaatcatccgttcgcttatgagcgtttatttttgtggcggctcatgcatcgaggatgtcaccactcatctgatgtaccacctttcgcttcatccgacacttcgcacatgcagtgccgacacgattcttagagccataaaggaactgacccaggataacatttcctacacatccgacactggcaagacctacgacttcaacacggcagacaagctgaatacactgctcctcaattgcctattgtccacagggcagctgaaagagggcgaggggtatgacgttgacttcgaccaccagttcatagaggctgagaagtttgatgcgaagcctacatacaagaagttccttggttatcgccctggcgtggcggttattggcaacttgattgtcggcattgagaacagcgacggcaacacaaatgtccgtttccaccagaaggacacgctgaagaggttctttgaaaggtttgaacaaaacaagcttattatcaaccgtttcagagctgattgcggctcgtgttctgaagagatagtggaagagattgctaaacactgcaagaccttctatatccgtgctaaccgatgcagttcgctctacaatgacatctttgccctcagaggttggaagaaagtggaattgggcggcattgagtttgagctggcctccattctcatcgagaaatggaaagggaaggcataccgtcttgtgattcaaagacagaagcggatagacggcgaactcgacctgtgggaaggagaatacacctaccgctgcatccttacaaatgactacgagtcttccgagaaagagattgtcgaattctataacctccgtggagggaaggaacgcatcttcgatgatatgaataacggattcggctggaacaggcttccaaaatcctttatgggagaaaacacggtgtttcttctgcttatggcactcatacgcaacttctataaattcatcatggcgaggcttgacgtgaagaggttcggactcaaagcaacaagccgcatcaagacgtttgtctttaagttcatctctgtgccagccaaatgggtcaggacatcaaggaagtatgtgctgaatatctattcatgcaacaatgcttatgccaatgtgttccagaatgactttggataacaccgacaacttatagtcgtgattttgcgtattgcctcaagtcgcatggtggggtaaggggcatttatatgtctttatggtgacattcgatgcactgtgccccctttttactaacgatgcagattcttttcgcttctgtatcatattaggcgcgtagttgcggatttgagggaaaaaaggcttttttttgctttagatcgtatttttttaatgaaaagtgtattagttatcaaaactttccttatttttgcacgagaattatatatctcttactaagagatcgacaaaaacctatcttgtattttgtagtctaaacaggtaaaaatcaattatttatctcttcgttttattatatacttgggcgcagaatataactcatgtgtcagaaatgagtaccgctttgtactttattatatggcgtctgattttttctatcggcatccagaattcatggagaagttggaataatgctggacggaatgaagatgaatgtgtcagaaccaaaatgacagctttgaaaagttacagatagtaattataacgcgtaaaagggtcgtatcaaactctgtattgagtaatgatacgatcctttctttagtcttttaggatgctcaaatttcagattataagttcatgttttcaaaaacagagttttgacaccgcggagtgaatttcagcttcaggaaacagaacattgaacggtggtgatggaatgagcatatattactttcgggaaacgctttacctctctttgataatacttacacagccggcaccgataatcaggaacactccagccaataccagcatgtttacttccggagcgacactacccggactggtaaacattttcagtacgatacctcctaaagaagctgcgacaatctgtggaacacaaatagttccattgaataatcccagataggttcccatatgtcctcctgttaatgcattggtcagaatggtaaagggaagggccagcatggctgcccatgcgcaacctatcaggatgaaggatgcaaataaagcatattgattatggataaagaaaatggagatgaatccaatgcctcccaataccagactgagtacgtaggcaaatttgcggttctgaatcatcgggatgatcgttgcccaaataacggaaccgatggcttggacagcaaataagatcccgacccaatctcccgctgtctggtattgtgcggattgtgtatccagtaccactctggaaacaccgtttgtcatggttgttatgaccggtgtgtcgaacacattcaaagcaacagttccattggtgtaagtccacatgaacatgaaggcggcccagcagaaaaattgtaccagtcctactgtccaaaaggctttgggagccttgaccagcagtttgaacatatttgtcttttcttttttgctttcatgggtgatgccatgatatgctgcatattcttcgggaggaaattcctttactttggccgaagtatagatcacgcatagaatcagtatcaatgcgccgatgtagaaagaatagatgacagagtcgggaataacacctttgggagcaatattactgatgccgatggcggcaaaaataaacgggaaaagatatcctgccagactgccggcattacagagaaaactctgaatggagtaagccagtcctttttgtttttcattcaccatatcgcccaccatcatcttgaagggctgcatggccatattgatagaggtatcaaggaacatcagtgatatcagaccgaataccatagctgcactgactgtcattccgaaactacctgcattagggagcaggcacatgacgcaaacagcaaccagagctcctgcaaacagataggggatacgccgtccgaaacgcgtccaagtgcggtcactcagtgcgcctatgatgggttggacgatgattcctgccagcggaggtaatatccaaaaatagcttaaactgtgtgggtctgctcccaaagtggaaaaaatacggctgatattcgcgctttgcaaagcgtagtgtaccttgcaaatttacacacctcatttttatgtaatttaatatatcccacttttagcaggatattactttacagttgttaactcttttaaagtgtccgtatcttcactccgattgctaaaaattgttttcctgttttccatccgatagctgcttcttgacagttgtataatctcacaacagtagagcagtctgtcaagcaatgccgctgcgacagcttcctctcccggtattgccagccactctgtaagggagtagttggctgtaacgataagcgatgtcttttcctgaaactcattcaccagtttgaacagcaacatgatatcttctcttttcaagggaaagagtgtggcattgtcaatggccagcagctgtgccttcatgatccgtttgtaggttttcatcgcatgcctggaaacatcccttgtcttcagacaggtcagaaggtcctccagcgtaaccatatatgccctgtatccggctttcaccgcctcatggacaagtccggcggcaatataggtctttcctgttccggaaccgcctgccagaagcaggttgtatgcctgtcccacccataccagctcgcgcagttcgcgcagctttctggagtcgattccttccgtccgggtaaagtcgtaacggtccaggtcatgccttgcaggaagcccggccgctttcaaacggcacaaatatttccggttctccctggtccggacctcctccctgaggcaggcgagtagaaactccggataggtcagctgcttttcctgggcctgatgcagcagttcctccagatgttcggtcagattgcccagcttgagcatacgtgcacattccatgagttccttcttatgtcttgtcataatccctgagtatttcgttataagactgtatcaatccgccttgtcggggcaggcgatcctccagtccgtatatttctgttccattttcctttcccctgcacacatattcacacaggcttttaaccgaatccccgttatagatgcctttgtccagacatatccgtatggcctctatcagtgtattcttgtcatatccgggaattatgcgcaggatcacctccagattatccctgtaataacgttccttcctccttttcagattatccatccacatggccacctccctgttgcccgacacatggacaaggatgcgttcggctatcttcactccggcgtttctcggttttctgtgggagtcgtcataaacggtccttccctttctggtacagagcgcatgccggcagatgagtttccccgtatccttgttgtacagctccacattcccttccgtttcctgcagccagacggttgtctgcccgctccggtaagttccgcatggcaggctgtaataattccccctgtactgcactgtattgtccttgcgtacatggtattccctcatctcctcctgcggtggttgtggcgtcccatgatagggcatgagaaagcctttctccacggcaaaatcttcccggggaacaagacgggtggtcccgtgcaccttcccgttccccgtcctttcaagccattcgagggcctccctgttcagactgtcaatatcacggaacacacgtgccaccaggaagttctccttcacatatttcactacgttctcgaccttgccttttgactcgggatcggccttatggcagaacaccggctggaaatgctgctccctgacaaacgtctggaacttccttgtcagcatcaggtcccccaggttctcccgggagatcagcaccctgtcctggtcataaaggatcttttccggtttccctccgaaatactcaaaagcacactcatgtgcatagatggcgagttccgtgtcgaaagggcggcgggcgaaaaaggtgaacttgtaacgtgaacgtgccaggacgatcgcaaaaaaatagactttcgtgcttctgccgtttcccgctgacatccatttctccccgaaatccgcctgcgcatactccccgtagggggtgtccggcagtttctcatagtccctgcgtatcctggcctccgacttctttccgatgccatatttgcagcgcaccttttctacaaaattgaatacggtcttgtcgcacacttccgggaaatccggatagcattccttaagccagtcatgtatccttgcggccgatatatacggatattcctccagagtcccccgcacatactcctcgtatcctgccagtttcagcgtgtatttgcgatgcgaattccgccgccttacaaaatcttcccgggacatctgcagatatctccgcacggtgcttctgtccactcccaggtgcttcccgatctgtgtcttgtttaatccttttgactgaagctctctaaccttgtaccacatatactgtttctctttaaaaaatcggctcgttgttatcataatgatgtctgtctttttgagccggcaaagataggcatccccggaaaagtgctgtattcacattttccattttcctgctggtaaagttacaaattacatgcatggataagaattccccgcattgggcgggatatacggaacggccgtacttgaaaaaacattcattccggataaaagtgagaacaaggttattttttatcgggtgtgaactgtagcggggacgggtactattcttcagactgccattcccggaactgtcgtaccttttttaccaaagacaatgccgccctccttgagaaatgtacgggggaaaacgtttggcagggaggtgaacggtattctgcaatttacttaaaaagtatatatgtataataatagaaaaagtaaatcattgcctgaagttttatatgtaagttacttgtttctataaaaaatccccactttcccttgaaaggaaaatggggacacggtaataataaaggagagccgtccgttatatttcttttgcatatcctgtccgtatgagatcggataggaatttctccggagtatcggtggcaatcctcaccccggcctgcaccacataacgttcggcaaaattgtgcatatactgctcgtcggtacagtcggaatccatccagctgcccacacggagttcatgcacaaactcttcggcgttgccggcaacgatacgctcgtcaccaggcaacatatatgtcttcttgttcatattattcatacggctaatttttttgttcttaatttataatacaacttttgtttctctcccaggaaaggaaaatcttccagtctgattcctgcaggcagagaacccacggatgcaaaggtaatcattctgtcgagaaaacacacccaattttctatttttgtaaaactgatggttcccgaatgctggcggaactctaccgtcctgtggcgtgaataggcttgaaggttcactttcatatacctgctggggaacagcccctgaagttccctgatgtttcgtgccgagcgtatccgctcatcgggaaactggatgagggagccacagtaagtgttgctgccgcccctgcgcgaggctggcatgaacttgtctatttccgcttcggcatgcttgtaggaaagcagcaggttccgccatgtagtgatgttgaagtcctccgcattcatgtgcacatgcaatccgcagcttccattaatcttgacattacaggagtccagcacccagcagaccctctccagcttctccagtccgtcctctccctccagtatggggcttacgagttcgaatgtgtcattcccgttcagactgctgtccgttaccagtttccagtgcggacggaggtcatggttgtatctttccgaggccacctcgattcccgcttccgtcagctcgcgtacgagccgctggcatgtgcagttataggcttctatctcgacaccgaatttccttctgaaagaataatcaagttcgggtgtggtggtggcggtgggagtccctgcggatacgatcagcccctcgtccctcattctcttgtagacattccatacaaacccacggtttccacgggttacaagatcggcaatttcacggtgggtgagtccgagcagcagaagttttcggattttcgaggtctttgtaccgtcctcggctaaaatggttctaatttgttcattcataagatgttatctcctttattatcacatatcaaaggtaatgatttttcttcgaatatccaagttttatcatgctatttatcagcgtgttagctttgttttgcttctgctaaaagttgtatccggtatttctgtgagccgtttttccttctttcatggggatttttccacatgcccgtcatttcctccatacgttttccccttttctgcatgtcatttcttttcatgggatggacctcccctaaaaacgccttgttccggacatgccacgctgcccttccttaccggggggctaaggggttcatccccttagtgaattcctaataaggaagagcaagaggtgttcccgcacacgtgaacatgaatcgacgcatagcgttgatatacaatagtttaattatatgcaatgttacaggtcgcgcatacatttgtatgcaccttttctcctttctctctggttcgcagtgggttaagttgtgggcatctccgtatgcgtgtccgatattttactaattttcagcaagttataaaacttttacctctctgcgacaggtggcgcttgcaggagaaaacaaaaacaagtagctttgtgacagctatttacatgtataactaaaacgcatacaacatgaaagaacattcaataaagtcggtcaggcttactcccacggtaaaagcccgtctggacacctttaagggaagcgatacggtcagtgtctgtgtggacagaatgattactttttttgaaataacgggattcaacccccgttacgcatccaaaaatccgacagccttggtggagaaaagaattgaggatcttattaagatcataaagtcccaggaacgtgacatcttcaagcccattcttgataaactggtcggcatgggaggcggcctccatgaatccccggactatgcaaggctgatgaatgagatgcatgatctgcaggaaaggaacaggaagctccagcaacagctggcggagtacggggagggctccccggcggatgtggaaaaagaacgggagaagctccgcaggctggcagaactgataaaattccagctcaatccggacaagttcccgaaggtgaaattcaatgatgatgtcaaggttcccgtcagcaccctgcagctgctcatcaagaagatcaacgaggaatatgtactgtaaagtccaccggcctgtaaatactccgggcgtgtcggacaacaagggaaaatgcgtgcagctggtggaatatctcagcaaggagctgaaggaggaacgtccttattatgataattttttttcacagaaagaggactatgtgacccctctgaccgtcatgcatcatatggacaacaaccacaggacactgaaacggaacgacgacaagttctatatgctcaccatcaatcccagcggtgaggagcagcagcacctcattgaaaaagtgaccggggaaaagaccggtgaattcccggagctctccccggagcagcagaaagaagtcctggctgaaatgaaacggctcacccgtgagtgcatggatgaatatgcccgtaatttttaccgggagaagatcaggtccggtgacgatctggtatggtatgggcgtgtggaaacagaacgccactataaaggcgatgatcccgaggtgaaagccggcaaggcaaaagccggtgaaaggaagccgggactgcagctgcatgtgcatattatcgtctcccgcatggacagatcccagaccgtgtccctttccccgctgtccaagagcaggggaaaccggcaggttctcgacggcagggatgtggtggtcggctttgaccgttcccagtggtccgcccggtgcgcctccaggttcaaccggctgtatggctacttcccttactgccggtccaaggatgagggcctgaaggaatattccggggaatggaaggtaaggaacgagttgcggaacgagactgtatcgagaatcaagcgtgagatcctgcacggggagttcagggaggaaaggcggctgtacatgaatgtctgccgtctgtaccggttcgtggtgaatcccaggaaggccatcatccaggaactgaaaaggctggggaccgatcttctgaccggaagggaaagatgagggccggtccgttcactcacacgggaacagctcccgtacctcctcaagaatccttgcgaagttcctgcccagctctcccggctcaaggacccgaacatcgggcaggggctcctcgttcctgtcgtcatacatctccagctttaccttgaagtagctgacgttggcacgcgtggcggaaccgatgaactccccgggttccagatccgcaaaatcctttccctgatagatgtcctctttctgggacgatacggtcacgctcctgttcgtgcttcccccgctttttcccgcgctgcgggatctccgttccttttcctcctttccgaacatcatgggataatatttcaatgactccacgtctttggtccgtccgaaaaactggttcccgaagttggcttccacggatgaacggtcgagcctgccatactggttctccaccttggaaccggactgtgttaaaagaacaaaggcgcaaagatactcacgcaggacggaaggcagcgtctcaaagtttttgatattgactgtcgtcatctcgtccaggaaatagacgaaaggaaccttgttccgcatggtgaactgccgggaagatatggtcatgagcatgccgatgaccggagcatagaccgagttcttggagaagttgttgctgatggcaaaaagtttcggattttccggatcgatcaggttgaaatcgaaatcgtcccctgaaaggacataggcgatctcctcgttctgtgaaacggtggccagattgttacacagcgtggagagataggatgcctgggtcttctcggaaccttccgccttcagataggcgccggccagcatttccgacacgaggttctgctgcaggaacagggagagctgccttgccgaggcggtcatgatgaaggccagtatatgcggcagcgtgcaatgctcggggaactcgtcccagaaccggaacgccacgccgcggaggatgcccagacctccggcgacccattcgttctgctgttccttcttgggaagcagcgcgagcagcacgtcctccatcagctggatcagttccgtgcggtccctcaccaccttgagcgggttgaaccggtacgaccgttcaggcctgtcgaaactgacatagtagaacttgtgcggatacctgtgccttttaatgaggttgtaggcggtacgggtatagtccgtatccttgaagtcatagatgaatccggcgaatcccagccgcatgtattcgctcagaagccattttccgatacttttcgtctttccggaaccggcccctccgtaaaccaggaagttggagtaatggtaatagaattcgagccgggactcccggattcctgacctgaccggcagccggatgggatcagccccgttcccctttgccggggttctggacaggtcccatatccgggaaaggaagaggattatgaacgaggcggccgccggacacagcatgtatccggggaagaacaggtgggccagaaaggtctcgcccgagaggcatgcaagaaatgcgaccaggttgacataccatctccggctcagcatgcagcaggccgttatcagtgacagcactgccagaagcgacagcttgcaatagaaaatgtaatgttccattgtacttttttagtttttacagctatttactttattaatatcatactttataagtaatccggtccaattactgcatttccgcctggaaggagtgtcccttttccccggccggaaacagacacctgaccgtatatccggaagggacccgtaccatgaccagggggctttcacatcccggcagcacggtaggccgtcccctcaacagggagatccatctggccggggatatcctttccggcctcgcgccggctccacggatagtctccagcatcatggtcatgtcatgggggacaccgttcacatacagggtggccccttctccggaaatccggatttcccgccttccccatgaaaggcttatagtgtttttttcaccgcactcgtccatatcttatttttccgtatcctgttttacatttccattcccgactctcttgcactccccggtgacacaccggatatcctcatcccgtatccggccggttcccttacggccatgagcttcctgccgtcgggaaggatgatgccgccgttaaagacggctttccagtcctcctgcccgagagaggcggggctgatccccgcttttctcatccgttccagaagggaggtcgcatccgtttcgaccccttgccgcctgagaaccgcccgcccgtatccgcaggagagttcaaggtctcctcttgccgtctgtattacggccggttccgcaattccggtgagatttttccggctggcggcgagtatgcccctcagttcccttgtgccgatttccaggcagaagcccagctttcggaggagattccggaaggcggtgacaatcctgtcccatgaggattggtccgtaccggcctcggccatccgggccagatactcttccgttgcgacacgtatgtccgtcttgtctgcagccgccatccggagaatctcatcccgtactttttctccgcatccgttgaagatgtcatccagaaaagcatccatatgcttgggacctgcaagctttctgaggccgtaatgtgccacaccctcatgcagcagggtacgctcgacgtccgctttcccccgggcatgtggaagatacaggcagatacgttgcgaggggatgtcataccagccccggatgtctttcccgcaggagagcaggtcgcgtatgtcgggagagcctgcctcgtcggcatgacggatcacttccaccggaatatgcagtttcccggccagaaaagacacatgacgtgcgagctcgtccatccggacgtcccttgaaaggaatatctgcccgtcccgggcgatatcctcggtggaaacggcaagcgtgttccgtctttgggcggaagtaaaatccagcctgctttccacattgcgcgcttccacctccccggcagtggaacggtattcctgtatgccgcttttaaaccggccgatgtcattcaccaggtcaaagatgttctcatatccgtacttctcagccacgaggctgaggggatagtcataatgtctcagtattgtcccgtagggcactttccggtcaagtgcggcaaatatgcctttgggggtattgtcgaaaccgccgccctccagaatccttccgtcagtggcccgcacgatgtccaggatcacattctccaccgtgtttttaaactccccgggattgcttccccgcgcaaagccctccatggtctgtattgcgtgctgtatctcatgggccaggacagacctcacatcatcagtccgggagatgtttatcacgattctgttgtccggatggaggtagcccccgcaatagtcggccgacggcaggtccacaaattccagccgggtccgtttcatttcaggataggcctggaacagttcatcgtctttcacatagtcatcaagatagatccgttcacgcagctcgtcctgttccttcagtccggctgccagctccgtcagttcctcaaaccgtttccactccgcttcagagagtgtttcgccctctatctgccggtcaagaagattttcaagctccccatgccaggactgtttttccagcagtcgtgaatagcccagatctccggccggatggtattcgaaatccgccgtctcataacgccacttgctatcagccccgcgttcccagcctgtcgccgcctttattgttccggcatccttgccggacttttccatttcgcgggcgacggcgaggttctccagccgcagggaggccccttcagaccggtcaagtctggaggcccctttctctccgatgaagcggaaacgttcatgtgcggttatcttcaggtcggcctcgctgaaaatgacatagttccgcgcgccgtcagcccggccgccggttgaacactccgccggatagtcaatcccggtaaaacccgcccgcgaaagaaacccgctggcaagccgctgtgaatcggtatcccggtccggattcatgaacatatggtccaaaaagccgtagaactctttcccgctgttccatacatgcgacctgccgctccagaactccgccgtggcttccggaaagaagaaacgttccttgcggagctgcaggaatatctttccctgctgctccgcggataccggcctgtcccagtacagatagttcatcccgttgtcttccggaatttccaccgtatagaggtggcgcggcggctcaatgcgtatcctgcccgcatctatgtcggaaagcagctcctgcttctgccgctcgaatgccttcctccgtccgctgtgtgcgcttgcgatacgcccgtccatatacacggaagaaatgttccgtttcaaactgtccacatcggtggaagaaaggatctggcgtttccatattctccatacctcatcaaaataatattcgttgtcaagcaccggggataaaggctccccgtcataggtgatgtggtttccccgctttataccgatggccgcatatttgcgggcgattcctttcacttccgtcacgtatgtcccccatccgtaggcctgcgccccttcaccggttccggtaaaggcatggtcgaaatgcccgaaggaggccggactgccgtgatagacctgacggaagcggatgttgtcatttgatgtggaaaacgcgcccgtgttttcataagcgtccttcaactgtccgggagacatcacggctatgtatttcactccctcgtcgtaaccgacaagcccgtcatagcccgcctccctgattttggacaaaaactccggggtttccgtcaacatccagcagtttcttttgcttgatgccagctccagcgctttctccggggataccgtacctccttttcctccataaaaagacaggacaggtatctcgctgcccaatgactgcaggattttttttacggcctgcccgtctttcgggtcaaaagggtttcttgaatttacatacaggtcatacacgtatccttcttccgtccattgttcattgccatatttgtcatcaggcatgctcattgcacgcgtctctgcaatacctcttgccttttccgcatcgacggaggtgaaaatcaggccggaatattcaccgcccttgaatgtgtggaacggagccttttggggtatataagtgatcccgtccctctgccatcccctctcgggagtaatctggtctctgcgcaaaggtgttccatggtggacaaccagaggctcgccattctcatcgacaatccttgaagctgcctccggtacattttcccagtctccaaaccagttcttgaatgctctggtgcgcacttggacccactgcctctcattcagggaagtcggactgccgttcggagctttcatgtatatgccgtccgccttgccacgtgtgacaagttccagttcttcgtccgtgacatgtttatcggaagtatgtgtcattgtttgccggcttaatatgataccttgttcataaagtcataaagagttttatcagcaaaaaacttgtttacttatttacatttccgaaatttaaagtaaataagtaaacaagtgatatatgtagaatgcaaatgttacttacatttccgcattggcctgccggcttgcctggtttatggtgcctgccgccttcagtgcatatcccgcgggtgttctggcaagcatcagtgcgcttccttttcctgcggctccggatgcgccggaaacaaggggcggctgtacggccttccccttcatcagggagtgccattccccggctttcatgttttccacggccaccctttccttgcgtagttccttgacaatcttccccacattgcattccttcctttccggaacggctgccgagttgaatttttcataagctttgacaagcttcttctccctgtttttcccggcagccgagacctcgctttcccgttccgcggcgttgtccgagtactgcgcctcgtaagtggcctggaagtactccctgtttatttccctgatctcgctatccagtttttccaccgcctctctgacctgctttgccgaaggtttctttgccacgtcctccgccgctttctttccggagtctccggaggtttcggatgtccgggccgctgccgcctccttgccggcggcattttccagtctgaggccgtacatttccatcgccagtcttttgatctcttctgtaggcgaactgataaacggtgccgcatcccggtctgcgttcagaacgacagactgcaccttttccgtagggttttctatataccggatattcatcggatcgtttctgacagccgccagttgtacagcctcggacggggcggacacgtatctgatgttctctcccttggcctgcaccgccgccagccgcacgctttcctcaggctgcctgatctgccggaagatatccggacttctctggacggccatatgctgcaccttctccgtcggttccgctatatgacggatgcattccggatttttctgtacggctgccagctgtactttttctgtcggctccctgattgccgagagataccggggatctttcaggacggccgtcagctgtaccttttctgcgggcttctgcagcaggaagatgcattccggtctcttctcgacggctttcagctgtactttttccgtagggtttgggatgaagccgacataggaaggcctgatgcctatgaccgtcagctgtaccctctcacttggcgaagtgatgaaatggatgttgtgcggtgcgtttctgacagctgtcagctgtaccttttccgtcggtttctcaataaagcagatgacacttctgtcccttctgaccgcggccatctggacacgggcggaagggttggcgatcatgctgatggcgcggggattgctcaataccgccctcatgtccttgtcgaacagcgcggcaaggtgttccaggattgtaggcatggctttcaatgtttaaaggatttgacttcatcaaaaaactcctttacggcttccgtatccggttctccgagtttcctgttccccttcatccggaataccagcctccgggctgcggccagaataccggttgtgggcggcaggtccgccttgaacatcctttccacggccgtgaagcaggccaggggggatggggcctgcatgagaaggacactttcaggagaggcaattacggcggaaagctgtactttttccgtagtgttggtgaacagccggacaagttccggctttttctgtacggcggcaatctgtactttttctgtcggctctttgatcctttggattgcgtccggattgtccagaactgctgcaagttgtgcatgttccggcaacaggttgttttcatttggcatggtagtttcttttttatgttatatttcggatacaatgataggagaatacactgcaattgtattgcgcttaataaaaattaagaaggtgcatcgtgtattacgacacaccttccatttttttattggatttccattctaattacaaaagaccgatactgtcattgtattaatacccggggttttgctcaagattcgggttattatcaatagctccctgaggaattggattgtatcgattatgcactttgaatacacggtcttcaatcttcttgtcagtagcaggggcgttcgtgtcaatctccgcacgtttcgtcggatcagtctcggcataatttacagttccgacaaccctttccaaaacaccattcaggactgtttctgcaaccatctttccattatcatctttccagcgcagaatatcagcccgacgcacaccttccccggccaattccaccccacgttcacggcggatcagccggcgtaatgtttcctttgaagcatacttctcacgatccactttcggcattcctacacgtccacgaatcagatccagtttgtcataaacatctgcagacggaccagaaagttcattgactgcttccgcataagtaagcaacacttctgcatagcggattacaatagggcaggcattcgtgttccaaataccattagcatattgttcatccaaatattttctccaggttaaggcggtctttgaagcattgttcgcagaaggaggatagtttgcattatccttaccattgattgtcttgtccagtgtattgactacagtgccattccagtccattcctgggtatataatggtcatggccatacgtggatcgcgaccggcaaacggatggtttgggtcataagagccggattcctctttggtcaagccgtcagccatttcataagtatccaccaggttctgagtcggaacaatggaggaccagccaccgtcaccattattatacatctggcctattgtgcccaattccaaagtggaattcacatattgaacagccaaaataatctcttttgagtcctgaccggcaactttgaacaaattactgtagtccggttccagatcgtactgtttcaaattcatgatggcctcggccatttcttttgctttcacataatcaccataatacagtgcgctgcgcattcggattgccatagcagcgccctttgcgatccgtcccctttcagagggagatgcattcagttcaccgatggctgtgtccaattctgtattgacgtaatttttcacttcctcctccgacttgcggggaactttagcttcatctgctgagttatagttgtcaatcacaggcactcctccataccaccagttcataacaaaatagcgataagcgcgaatagtacggacctgaccgatcaaatcgtttttggtctgctcattggaaaatgggatctcctttaccttttccaggaatgtgttacaacggcggatgactgagaaatcataaaagcttgcaacagcccctgacggagtcattgtaccgttgccaatggtcttatagttttcccattcaaagttgttatatccaaaatccgacccgcagtcgagatataagatattgccaccatcttcccagctggaagtatcgtagttattaccgccataacacccgatagcaaatttttgggcatcatcctcggttttccacgtagtggcaggagacagggcatccaatggagctgtatctagaaaatcagagcaagatgtaatcattgtcaccgctcctatgatcatatattgtttcaagtatttcataattccattttttttagtctataacaatttagaatgtaacattaacgccgaatgcatgagtacgtaatagaggataggaagacagccgttggcttgtggattcagggtctatattgatcttcatcttatcaaaagtcaatagattctctacagaatagtaaatacggatattctcaacaccaaccgaattcaaccagcctttcggcaaagtatatcccaactgcaaatttttcagacgcaaataacttgtatcttgtaaccaaaaatccgattgtaccgaacggctgctactggccgagtttgtatcgtaaaaaatacgtggcatggaggcatcatggttatcgggtgtccaggcatctctccaaatagtagccggatgagcagcgtcacccgagaaattaccatacacctcgtatccgtcaaacaggcgtttcacacccgccgcaccattgaacatcaatgataagtcaattcctttccagcccgcatttatattgaatccgtaaataattttaggatcggaacttccacaatattcacggtcatcagctgtcagtttaccatctttatttgtatccacataacgcaaatcgcctgccttgaaagttttaccgaaaggattaccgtatttggccgtatatgcatcagcttcttcttgagaattaaaaaatccatccgccctataaatataataggaattcattgcttcacctaccttattacgctggctgtaaccatcagtagcatccaggtacttgttagggtcgccgcctcccagatccagaatttcattcttattgtaagagaaattgcccgcaattccgaaatcaacctgacctatttttgtattgtagcttaaatttatttctataccactgtttctcatagagcctacattatccttataggcatccaaagcaaattctttagggactgtcacatccataattataccagtagtcttccgattataataatccagagaaccattcagtttattgaataaagtaaagtcaacgccgactccccaagtagaggctttttcccatgaaatggtttccagacgatatttccgttgataataaccagaattcaaagagcctccaaatgcatatttggaatcgagattatacgtgttcaaggcaggataatagtcattattactgccactcaatgcatcctgattacccagctgcccccaagaagctcgaattttcagtccggacaaccagctgtcttttgcactttccataaatgcttcctcgctgatgcgccatgcacccgagaaagaaggaaaatatccccaacggtgaccttccgcaaaacgggaagaggcgtccgcacgaatgttggcttccaagagatatttacctgcaaaatcatagttaatacgggcaaaccatgaaatcattgccaattcagctgtatacccttcattgctttgggtagaagcatcaccggcattcatatccgtcaattcattattagggaatttcttgcggacggctttctgatatttataattatatttttccgtatgccatcccaacagacccttaatattatgcttgccgaaatttttattgtagttcaataaggcgtcatagtttgtgcggtcccatttataaaaacgctcgtccaactgactgggatcagattctttattctcattatactttatatatttttggaaataattgtaattttgtaaattgttgacgtaagcaccttgcaaggttaattttaagccatcaaatatttcatagtctacagcggccatccccgaaaaattataattgtcacggttcaccttcatgcccgaatctaaccaggcaatgggactgccgtctgaaattgtgccccaagtgccgtcatcatagcgggctacaatccaaggagcgatcaaattcaactgcctgatgatctgatccgagctacccccgtagtaggcggaactggcgtcactgtaatcatttttaatgaaagacaggttcatgcgcgcactcaaacgtttattaatcttcatgtccagattggtacgcgcattaaactgttcacgccctgcgttaggcaaaatacctgtttggttcaaatatcccagcgaggccatatattttacattttcagaaccaccgttgatattgacattatggcgatgttgaacacccgtcttatatgccaggtcataccagtcggtatccggatagagcgggtcattcccgtctttaaacttttgcagctcggtatcattgaaacgcttcgacataccttcagcctccaatgcctgattcagcagggatgcgtattcgtatgaccccatacgctcaatcatattcgttgcattctggaaacttagataaccactgtaggaaattttagtctgtccggtcttgccgcgtttggtagttatcaaaacaacaccgttggcagctttagaaccataaattgctgccgaagcagcatccttcaatacagaaatgctttctatgtcattagggtcgaccgcactcaatgtaccggtttcaatgccatccactaaaatataaggtcccgcttcattcaatgtgccgatcccacgaacacggattttgccggcatcctgccccggtgccccgttggttcctgtaatagcaacacccggcatcaaaccttgcaaaccactggatacattctgaataggacgattctccaactctttgctgtctaccatagcaacagaacctgaaagattcgcctttttctgtgtgccataacctactaccacaacctcacttagagtctttgaatcttctttcaagataacattcagcgggctgccgttccatttaatctcttgtgtctgatatcccacataagagattacaatcacatctcctttcttaatcccatcgaggctaaaattaccatcaaaatcggtaattgttccgttagtggtaccttttactacaacagaggctccaataacagactctccggtagcatctttcacaagtcctttgcatattcccgcttgctgtgtggtcgcgaaagaatttgctccagaggccgtagctgtagaaattgttccggagaataaagttccaaggaataataccatactaacagattgcagtctttttaacataatattgagttttgaggtttattaaaactatagatatttaaaattttaataactataatttcaatttgatttaaattaacgtcgcaaatatataataatttttaaagagacgcaataacagatgaaaaagtttgagttgaaatggaaattatacaattatataagtatccggaaagttggtccccattatggattataacaaatttgataacatgtcttattgaagtttgtactaatattcttgaccacctgtcagggtcattgcttcaggattaaactggacggggactgtttggggactcttccggtattgtagctcgccatccaaaaacattgcatggatattgagcgagtcagggggcgagaacgatgcaggaactgtcactccattgataatttctgggcagtacttgtttatatacatttcttctggaagcccattggagtgaatattggaccattcaaagttgatgtcaacagcatacaaagatgaagaagcacataattcatgtgagatctttattctaaaaacatcaaactaaaaaaccgctcctacttgtcacaagccggaacggttcagattagttacgttttgacaatctactttatttctcaagaacaaaacaatggtggatttgttcacaacagcttatccgaaaagaaatgcacagtaggaaaacacaaaaactccccagcttatcacaagccagggagtcataagggaaaatccccatacgcccttattcctaatggtaacaacatgatgaaaccctatcatacactgtcaggacgacatgggatgcacttttctcctgtttcttcacatatgaaaaaagacagaaaagatgtattcagtcccgtttctgtattctgcagtcctttacgttgcaatagtgcaggaaggggtcagcccttgaacctgtacatgtgcctcacggcatgttcatatgacatctttgaataacatcaatcggaccttcacaggcctgaaagggaaaatgaaatactgcggtcacttcaacagaaacatacagacacatcaaaagtacagtttaacaaaaaaaacaaaataaaggatcgaattgttttgaaacacgggatgttttatatattttaacaagaagataatggaatatattcttcctgcaatacgggagcttccttcacggcagaaggaagcggcaacatatccatataatccgaaggttcgcaaccgcctggaaaggagtagtgaaaggtctgacaaagccgggcccataagttcactcaggaagataaggcagcgtgtgccccgacaataagaatgtctgtaaaaaatggaataccgtgcactgtattccaccataccaaaaagaaccggtgaaacagccggaaggaacgcctggcattatgtttctaacagtaagggcggaaaacattgtagaaatcctattaccgccttgaacgtatacggacgacagcccgaaaacgacacctgcaaagaacaggcagatgaatacaaacagacaggtaagttttctccaaagtatcctccccagctgactctgataaccctcccggcaaaccgggaggggatccacatacacactccatgcataagcccttcccgcatttgctgcataggttgaccgcatccctgtccgaataatagcaacatttcatccgcacgtttttatatacatataaatatataataaaatcacagaaattgcacaggtttataaaattattaccgaagaatgagcattccgtatggcaggtataatattatatgaaaaaatgcctttccggaccgtcacggatcagaaaaggcatattctcattataggaataggatacggctatatacgcatgatatttgagactgataacattaggtataaattgtttccgtaccgtatcctctattggataacgagttcatgcccgtattgttcatcatatgttttttcagtcacataacggccagataccatatccaaattataatttatacaccagtctttgatacaagaaagggaaactgtctgaaacatatagtccagacaatccctttctatatcacggtacaggtaagctctcttgcaataccggcacatgtgcctcgcggcatgctgatctaacatctataaataaaacttccgaacttccggcttatcacaagcgggaaagacaaaaataatttggtggaagcgagttaacacagcttgttatttttatataaacatattttctgatagaaagttcaatctaaatttggctttaatatttttttaataaataaaaagaacggatattaacgaataaactatatggttcgtttttttctttatttaaattctgtcaataaataccgataaaaaaggtaacatgtactttggtcgcaaatattatgatcaggccgctttggtttcaattatgatatttaatgaaaggacgcttgcaatgaatgcatctgccaaatgaaagaaggtgtgcattttgcacaccttcaagtggaatttaaggtggtgtggccgtttcaggccgcttcagtcatttccttgtacagcatgatgtccgtataggacgaactgtagttcattctggccgtgagggtggatatgccggcccccttgaaaggattgccggtttcaggatgttcctccatccaccggcagaaatccagtatgggggatttgccggaagtgaaatagatgaaagggtgtccttccagtaccagcaggacatccagatagtccgtaagtttccagtccatcctgtatgtgctgatgtccgtcgccatgtaggggggatctatcagaaagaccacatccggggagtccctgtacctgtccaccagctccctgtagtcacagcataccacctcgagtccgtcaagatagccctcgcagcagtagtcgctcaggcgcatattgttgtagaaattcagttttccgagctccccgatgttcctggcatatttgccggagaacagcagggaggaagagatggtgagatagtccacaaagccggtgctttcctcccggcggatacgttccaggaacataccgtgcatcttcttggagagcatcctgtggcgggggattccttctgagaggcggcggaggtcggaaagcagggcgttcgtccggctgatgttctccagacgctcgcggtagttgtcgtggtcattgtagattacggttgcatcgggtctttcccgcttggtgatgtgcgagagcagtccggaaccgccgaacagatcgacgaacactgtcctgtcactgaaacgcttcaagacttttctgaattccgatgcgaacatgcgtttctgtcccacaaaaggaagcggggcctgactgtagtggtactttttcattgctgtaatcattctgtcgtgtaagagtgtttatgtttcggatacaaagttcatttcttctccccatgaaagcaaaaattccactcttttcatactgcatggaacgtacattcttttttgaaccgcccgagaatctcatacacctttctttcggaaacgccatgtctggccgagagaaaggccacacaatacgtcaccttttcacctttgcggcgcatttgttcgtactccttgtacaggtcgatatatttgtagtcgtccggcttgtaacctgtcccggccagacgctccagaagctccctattaaaatttaggatctcaaacagtgtcatagcaaatatttttctatctttgcagagccaatcatttattaaacacaaaaaacgaagccacgacagagggtatttgcccccggtcgcgtggcttcgctcgtgtagttaataagtgattggcgttactttttaacaggccgggggcttttttactttacttcccatataaaaatccccgcagatctttttttattatgcgtatatgtgacaggctttgcgtctttaaggctgcaagatatactacaaggctgcaatttcgttgcagcatgacttttattttcagaaaaacacgtttgtttctatggaaagtgtacttatttatatattaaagtaaataagtaatatacatgattatgtatattttcatatttaagtatgtaatgtgaaatatatttaaagtataatactaataaagtaaatatgtagaaaaatatttggtaaacatttcaaaaatgcgtatctttacatcgtaataatcaaggagatagacaaatcatgaaaacaattacgacagcatgtgtaaaccacaagggcggtgtggcaaagaccacttcgctgctgaatctggcggccggaatcgcacggctgcacggaaagaaggtatgtatcatagatgcggacccgcaggcgaacacgacgatggcggcgttcggggaggaaatggcaagtcttccccaggatgtcatgctcgagagtgtgctgcaggaaatcatgcaggacagacccctggagctgaagcctctcacgtggttggacagggtggatgtgctgccggcgtccttggacctggcggccacggaagtgatcatgaataccacccccgggagggaatttcttttcagggaaataataagaggcctggaaaagaaatatgaccatattctgatagactgtcctccctcattgggcatcatcacacagaacgcgcttatggcgagtgattttgtgatcatacccacggacgggaactatttcgccatgaaaggaatcgagaagatacattatatcatcggcctgctcagaaggaaactcggcgcggaggtcaggattctcggttacttcatgacaaaatacaatgcgggaagaaagctggacgtggacatcagggagagtctgatagaaacattgggggagagcgtgttcgagacaaccatacggaacaacgtggcgctgggagaggcgcagtacaatgcacggagcattttcgattatgcaccctcgtcaaacggggcaagggattaccggagtctgactgaggaattccttaaaaggatcaggaaaatgaacaaataataaaggagaaggaatatgaaagaattcaagtcgaaagggatttccttggaaaatatggtgggagcagaccccatgaaagaaaaaaaaatggcgaggacaccgggaaaggcgtataaccagaccattgtcctgaccgaggatctggtatgggaactgaggacatttgccgcggaccaccgttacagaggggtaaagactgtcatagaagcgatgataggctgctttctcagggaggacgggacattggaccgcgacaggttggagcagttctggaaagaatacgtaaagaagtaaagttttatattacttttgaagtaaataatatttcaaagtaagatacttataaactgaaagaagtaatacaatgaaaattttaaggtatatattgttggcctcactcacatgtgcattatccgcatgtgaaaaggatgagatcctgccggaacctgaaccgccggttgtcaccccgggggatgatccgggaaaggatgaggaagaaaagatacggctcggaataaccgcatcgttgcaggcgatgcagacaaaaggaatcatagaggcattcctgccgggacatgagatgggggtgtttatctgtactactgacaccggctctccatatgtatataatgtgccttatgcctttgacggtaaaaaatggaatgccggcggggacgctccggtagagggtgattcggaggtggccgcttatctgccgtacaacggacaggcatcaggggacaggctcatcccttttgaactggcggaccagcacgacatcctgtatggaaggacaacggtcaccagggacattccgacagcggatattgagatgaaacatgccatgagcctggtgcgcatcaaaattctgaaaaatgaatatatgggagaaggcattgtttcaaatataaggtttgacaatgtgatcacaaggatgacgcttgacatcaggcgggaaaccaactcccccctgatattcgatttctcaagcagggggagcctgcaagctggcggcaactatcatctgaacgatgcagatccggtggtagtggagacaattcttccccctgtctacggttatgaccagaaagcgacagtctgttttaccattgacggaaaggaatatccctatgagttccacagggaccatgaatgggaggcgggaatgaaatacacctatacactgaaaatgacgggaaactacaactccccggtcaacatggagcaggtggacatcgatgtggagtactggagccggtatggcaagacggaccagattatactcaacccgaatccggacgactatcctttcaaggtatggcccaattataccgaatacggctatgactgctatcagaatgaaggcaaggtgttcggaaccttttacaatccctattgcgataacggcgagggagagttacggtttgtatttatgaggccgggtacgaatgagattgtggagcagttccagccgatagacatcaagacgaatggggcatgggatggaaaacgtatccagtgctatgtgacttccgctcccggtacataccagcttgtgccgttattccgcaagaaaggagaaacgatgtggtgcagggcagtgggatattcctatggcagtacagacgaggaatggctgtatgaggtgaaagcacctgcatcggatgacctgccggcattgcgcatgatggaagtggaaggacagggatatacctctattcttgcatatccggtccctgatgatgatccgtggaatctggtatatactttatccaaccggggggaaaaggcgctaaggggcgaaataaaagcggtctgggaacgtgagttcaagctgaagtccaattcatatagtccaagtaccaaaaagaaaggagcagtaaacgatgaggaatggaaagatgaaatcggtaaggattctgtggacattccgacaggaacacgtttctggaagggtattatgagttgtaaattcccagttaaaagacttgctccccgacatgatggagtaaaatatgccattccagtcttacatttatattggagagctgaaaattccaatgagtggatattacttcgttgtgatgcggattatctgttcaactgcaattatacaggagattatatatgggatgaaacgacgaattatgtgaaagtcatgccacaaagttggcattaaaatttaggcaaataacccaaataaagaaattgaaatataattcattgaaatgacataagatgaatttaaggtggaaaatccccgctgcagtgatgcaccggggatttgttttcttattacgatatcataaattaaaactccatctgttgcactttgattcaactatttcccaatttattcattgaataatatcctgtgcccctattttctcatattttgacttaggaactgttttaaatccgcttcagaaaaaaaatattcagtttcttaaatccttctgcgagacttacttttttactttcagctttttagccagctgctgatgagctttggctttggcgcgttggtagattttcagagctttgtcctgggctttctcatcggctgcattttttacgttatcatagagtgtccagagattggcagcagcagctacctctttctgggcgatggtatatgcttcggccttggcttcggtagcttcttcttcttctgccgaagcataggcgtgcttataccccttcatttcatcccaatgaccgcgggtaaaatcggggaaagtcacagctgcacagttgttatccatcgacagagcgcccaattccgagagacagcaccattcggctagatcatagacatccatatcaagcggcaaaccgttttgcaagcagtacaccaggcgagcatccatgatgtaatccatgccaccatgccccatggcacgccccttttcgccaaacttggtgaggatagggtgataatatttcttttcaagggcctccttctgagcgtcattcagaaaactgtgggcattgatatcgtccatgttgggcgcagtatctttcatgacatcgcccgacaaggcatattcgggtgtggggtacttggtggcgtagcctttagttccggtcagcttaaacaggcggttgtatggctgcggtgtcatgacgttgtgttgaatttccactaccttgccacgagctgtgcgcatcagcgtagtagtgtggtcaccgttgcggaattcctttggttccttgccggtgaggttctcgacatattgcttacccacaaaactttcggtatccatagctaccaaggtagtgaagcggtctccgcggtgaatgtccatacattgagccactggacccagaccatgggtggcatacacatcaccgcggttctccatattatacttcatgcgccaatgcaagttgtcggtatcgttgtcgttaggatcttgccagtacgacttccaaaaagccgacagttcgtggatgtaagcgccttcagcccgaatgatttcgccgaatactccatccttagccatggccaaggcattcatctcataatagtcatagcagcagttctctaggatgaagcagtgcaggcgtgtctgttcagagagatcaatcaagctccagcattgctctaggttcatggccgatggcacttctatagccacgtgcttgccatgtttcatggcatacttagccacagggaagtggtgattccagtcagtggcaatatacaccagatcgatgtctggacgttgacaaagggtttcataccctttctcacctgaatagatatcggccggaatcaagctggcatcacgtaggtatttctgggatgcctctgcacggtcttcttcgtagtcgcatagtgccacgacttctacacctgggatgttgcagaagcgccacaccgcccaagggccgcgcatacccaagcccacaaaagccacacgcacggtttccatcttcggagcggtaagaccgagcacatgctgttggtcggtcggccgctcaggggtttctattacaagggttcccttatcccaatggatttgggtagagggggacagtgattgcgcctgaaggccgctaatagacagcaacatcaagacagataacaaaagctttttcagtttcatactactattttttttaccaaataaacggttgagcgggcgaggctctgtgattgattcgtttgacctccctgccgcctgagcctcttttcagaagcgacaggaaggtcgtataatgaactgcagacaaacgcttagcgggctgtcaacaggatgcgctgtccatcagcctgtacagcatacaccttggcactgctttgatataccttagatggcactgtaaaggtgaaagagttggagaaatacagcaggcggctgtttgcttcgttttcacgcacctcaaaagccaccgcttcttcaccgtcactcacacggatagtagcaccttgatgtgaagaactgagagtgtaggtgggcaccttcgaaatcttggtatgattcttaaacacctcgtagtaacctacatcacctgactcttgcgcacgaggatcgctcgacgggaagaaatcacgcttccggtcttcgatgtactgaatgggtgccgccttcggatacttcttgttttgaatgtatgccttggtttcacatatcatttgttcggtcactgtatattgtgcttggccatactgctcaatgggggcatcaaccgccttgaagaatccccaggtttcaaagaactcggtaaggtcctcctgtgtggcatcacacactgctttgacaaaggccatctgcctctgtcccggctgatgggtaggcacatgctgatacgtggtgcgcatcagctcgaaaatcttcggccataccatgggtttcttgtcgtgtcctttacatagttcgtagtaaagccacaactgccaattcatgcgcatgtggatctccgtatcttcgccttggtgcgtagcactacccatgttataccaagcctgattctgtccatagacacattccgccaggtaatccaagccccggccacgtgatttgtatttgcccaactggtagatgatgtagttagagaagagattgttgctcgactccgtagatcccatccagtcaatagccagctgatgcacatgacctatttcgtgagccggtccccaagcattgtcctcagctaacatcaccttatcatataagaggatgttgtccaaataggtatagacaaaagctattcggtaatcggatgcccacatatacgctccctccggcgagatagcaaagaggtggttattgaactggttagcatgcattttgtcaatacccatcaggctttgttcccactccacgatattatcccaaaggtggatggccgaaagaatctcggtgcgcacatgtttcagcatctccgagcgatggaagtagaaaatcatcttttcacctttcactccgaagtatttatcggtagctttggaaagcagttcagcgtacttctcattggtctgatgacgctgcagatcgaaatagccggtcacctgtccgctacctagcggaatatgaatacggatggaggtaggattcgactggaggtcagccgtatacatcacaaacagctggccgcggttgcggatggtgattttattcactccttctttgagaaaataaatatcgcctgaagctgctgtctgcacataattcttctcttcgccgaagcttgtggtttcctccccgatacactgcagcgcgacagggtagccgtgagtattgcccactaggacaataatttcatcgttcgcctcgaccgcgataccggtaagattatccagacaactgtagtgtttggtcatcagcctatcggcccacacgttgatgtcgctataagcctgataatcctggatacggaattctttctcccaggcatcgtaggtaccgtttttcaactgcgtggcaaggttgacaaagtagcccggcaactgattgatctgttctaaggtggcttctggcttcagttcactacaggtaatgtctgtaaacaccgccagcagttgttgttcgagcttgttgtccggattcttttgaaaaaactccatctccgaacagctcacaaaattacctgctcccgattctacagcgaacttcactttggtgacttttttcactctctggctgaataccacgcggctggcgttgttctgcatttgaaaatcataattgccttgcaactgatactcgggcatttcgactgaagcagtgtaaatcttcagcttgccgaagttaccgttgccgctacgcgaatggtagaggatgtaatctaaatcccgggtgccatcgaactcatactccagtgtcactgggaagtgggcttcctgtccccagggcgagtgataatgtttctcatcgaatttcccgtcgtaggtatgttcaatgccataacctggctgcaattcactggctacagccgaaataggggtcaacttcacatcaccttccacttctacatccgatgattccgacgctttctttttctgtgtcaaggtcaaggtttcctgcagcagactatctttatacgcagtaaaggtcaaggttacggtacgagcttcgtacaagggattggcggcggcatgataaggataattcttcgatactagggcacgggtagccggcgcttccactgcctgcaaccagtcgccttcggccgacttctccaccgcatattctatgttggaagtgactgtaacaattacctcgccgccctcggcctcgagcgtagaaaccgaactcttgacgagcagagccggaccgtaacccaattgtttgacatgaatttcataattcttcaccagtgactttaccgtcaccacggcttcacgtatctcaggctcctcactcgccttcaccaaaatcttaatgctcggcttcgaagtagacaaatctttagccgcaatacaccaatcttggttagaagccacatcccaccgacttgcatcgagggtagtgctgaccggtatagatagctctcccttttccttggtaaaattctgttgtaaatctacttctgcaagagtgaatttttggatctgttcatccccggaattatcatcgctgcatccatagacgccaaatacatagaagggcaaaagcatcaataaaagggttggtaatattttcataaattagtgttatagaagtaagttaaaagaagagataatatgtagggtattttcttagatattatctcttcctaatataagatatattaagctgactgattaatttacatgcaacttcaattcggccagcgcgaaactgttacctgctggagtagattctaccaccaggcggatgtgcttgaactctttgcccaccagaaccggtgatttataggtgccttttgtagcagtggggaatccttccataatcgtcattattttactaaatgtgataccgtccatactgcctagcacactgatacgctgcggtgccccgttgttgttattgtgacgtacttggtattcaaacatcaaagccgtgtgtggttcatctaaattcaactgtatccagtgcggcaaccccggttcttccaaataatcggaatggtagtaggtatctggattaccgtcgaacatatagtcaatttttccttccacttcacggttaggatggatggctgtcataccacgtgacagagtgaccggatgcagtttcgattcatcaggcacataggagatgccgaagagacacgactgtttattaggattgatttcaaagtaaggcgagctacattgtgtcattttcaaaggtagcacatagttaccataactcaatttatttcgtttcacggttacggttaagctagctgatttactgccagctgtaaacaaaatctttccttcgttgctcagcgtataagcttcttccgacagcatggtgtaatccaccccgttcttttcattatactcggtcaacagactctcgtctggctccagtgtacagctaaaattccacttattgtctaccgaaaagaccgcaggcagattcagctcgatttcatttgcatccatagcatctgaaatgatattcagattatatcctgttttctcaaatgcaacattaggtacaattacagcgggcttcagaaacacatatttacgctcggcattgatggaatccgcactattttgcaagataaatggaatcacaaaattcccctcttgctggttgctttctaggatcttatccgtaatcaatgtaacggatctggtctggtaagtatcgttaggaccgaattctatctgtttatctccattaaatacgtaacaatcttccgggtataattgatagtcttttccgttttgttcattgtagatttccagcaacgctttatccataacatcaatggaagctcgggtgactgtacccagttgagcgcctgatttgttgacaatcaactggtattctccgttttcacctgtattatatacttccacttcaatctcatcacagtttcggaaggatagaatggtgctgaattcatccaaaaactcatccttattatcatcgcaagcaatataggttaggcagcaggctgctgtcagggctatagttaataatttgtttttcatacaactgattttgttaaattatacataccgggggcattaccaaccataattttgtgtcaacaacttgttgcgatccagttctcgctgagagaaaggatagagataatgcttgttttggaagacacgggtttcaaaagccgttctctcccagaaaccgtcgggggtttcagttcccttcataccagcatcaagcggacaggaagtgttcataccatacatcttgccgttgtcagtttgagtagcaatcatccatgtacgggtatcgaaatagcgatggcgttcgaaagccaattctatctgacgttcttttctgcagagctgaatcaactcttctgtagaaacttgtccgtagatacttgtgatggggtccaatcccgcgcgtttccgtaggtcggcccatttttccatggctagggcttcatagctgggatctagtgccaccccattcttcttgcactcgagcacggcttcaatgaaatttaggtagatttctcccaaacgaaataccgggaaagttatattaccccactgtccttcggacgaattgagtttatggtcatagaaacggttgcagaggtagccactctttggatagtcgtgactcttattaccgttaccgcctttcgcaaaagagatggaagtagcgctattgccgtgcaaccactggtttccgccaaagaatacggtgacatagaagcggggttcccgatccttatacatattgggagcttcgatttcaaaatcagccttgttgctccaaccaccagacggatatatccaagatgatttctccagttcggaagccagttcatagccagataagggctctacgataggtgttccatctgcttcatatcctgtgataggataccaaccggtattcatggcatacgcatccaccaaagcttgagtagggcctactgccccataagccgtaccagccacgccggtgggcacagtacctactccccaagaaaacagtccgttataacggtcagtccaaatcagctctttattccaagtttcgtgtgtcactccataataatcttcatacgggttatcgttaccagctcggtaaagttcgtagcagggattatcaatcagtttcttggctgcttcagcagctttctgccatttggtattatcaagctcagggaagagcttaacacctgacagttcagggaagtcgggtgcatcgggattcttcaccgtgctatagagtttattaccattgaacagcgggcgggccgaatatagcagtagtcgggagatcacggcatggcaagtacctaccgtagccaatccccacttcgccgccggcaaatcggactgttgaagaacaacgccactttcagcacactgcgtcatttcgctgaccacgtagttaacacattgatcccaggtattgcgcgggcgatacagttcttctgtgctggcggtgaaatccagcaaatcatcgcctaacagaaataccggaccatagtcacgcatcatcagaaaataatagtaagcacgggcaaaacgagtctgccagtaccattcgtccaactgatctttagtgactaacgggtcgctgcatttgtacacattttgcaggaaaatattacattcgcggatacctttataatagtgatccatcttataataaggaacctgtgaggggttccaggtaccaaagtttatccaacggtactgacggtcatacgcaatggtacattcgtccgatgctcctaaatacggttcagtatcaccctgcaagcttccattttcattgggcaagaaagacatggcatttagccaatattgctgggtagtgtttctggattcccagattttatcaaaagtcagtttttcgtcttcttgtctatcaagaaaatcttcgcatgagcccaaggtaaaagctccaagtgctaagtatattatggatttgaagtaatttttatatttcatatttggtataatttaaaagttagcattgaatccgacagtaacaacacgattcagcggatagcctgagccatctgatgagcctttggctttttcaggatcccataatttgaaagagctgaatgtaagtaaattgtttccggatacataaaatctcaacgatttaataaatgttttagtgacaaattctttaggtaaagtatatccgatttcaatgtttttcagacgtaaaaaggagccattgcgcaaccaccaggtggaattcttgttgttgttggaagcgccggcacccccgctaccattgcttaggcgcggataggtgacatgagcattctgttcaggcgaattagtagacatccacactttgccccacaggtctttattgatagccgcacgttccatgttaccactggagaacggactctttaccgatacaccatctagaaagaaagaagtatgagcagaaccttggaagaaggcgttgatatcccagtttttccattgtgcacccaaaccgaaaccgtacatgatttccggcaggttggtataaccgatcgccacctcatcttgtgtatcgatgatgccgtcgccattgatatcctgatatttgatatctcctacacggtattcaccgaaagtctgacgcgggctgttgtcaatttcttcctgactttggaatagacctagggctacaagaccgaaaggctgcatctgaccgtcagatccgaacggcttgcctatgcgattttggtatttgtattcccaatcgggttcgtcgttatcaagcagcttgttgcggctgaaagtaaagttaccgcgggcagttagaaatacttttccaatctggtgattgtactctacattggcatcaaatcccttgttgagtgttctacctatattaacatacggaatggtggataaaccgacaatggctggcaaaccggcgcgttgcaggaaaatgccttgacgctcttcacggaagtagtcagcctgcacctttaccttattgaacagagagaattccacacccaaattgagtttggtagcctcttcccaggaagcatacaaattttctatttcccctacgcggatacctgctcccccttgattaccgctttggccgaaccaccagccttgatcgccagtgcccacaattgtagattcataaacccaacgtctttgtccgccgatatcatcgttacctactttaccataagaacctttcagtttcaacatatcaatggtcttggtgagcggttcaaaccatttttcgttcgataccatccatcccaaagcaaaagccgggaagaaaccgaagcgatgtccgcgggcaaagttttcagatccgttgtatcccatgttcacttcggcaaaataagtatctcgaaaagcatacgtcacgcgaccagccaagccttggttcttataaggtaatgctgcattgccgtcggcagcctgggtgttggtatggattttctgattataaaggaaaagagctcccacgcgatggttaccaaataagcgattatagttcaacgaaccttccagataacgggtcatagtaccttggcgtccaatttcataacctaatgattcactgccagtgtgtacagggtcccattctccatcattgttgttgtcatcgtacatcagtcgaccttccgcatcacgtccgcgtgcatggtagaagctgggtgatttggagcgacgttgcagcgtggtattccaagcatcccaagagaatttgatattagcagttagaccttccagcggttcccaaatcttaccgaagtcttgagtcaagccaatcaaagattgagccgaattccaaaattgttcacgataacctgagtgtaccagcatattccacggattgtggccggagtcggtagacggaccggacaaagtaccatcggaatactgtaccggaaatgcattcggagaagcattaaaggtatagctccaaatatcgttatcattatcgccgaagccaggaccgaacgacttttcatagatattggctaggttgacattcaacgtggtactcttagtcacattcaaatcgacattggcacggaaattgaacttgttataacggatggctgagttgtaaccatagatattaccagcgtttttatagatagaactttcattgtagaacgaaccggacacataatacttaatgttgtcaccaccaccagtcacactcaagttcacacgctggttctctgccatgtcatcaaacagggcatcaaaccaatccacatccggataaagatctggatcgctgtggtcgcgatatttctgaatcacttccggagagtagtagttggtaccactggcttcattgtaaagttctgcccattgcgccgagttaatcatttccggtcgtttggtgggagcagtaaagccgaattctgtgcggacattgatagccggttttccttcctgccctttcttggtagtaatcaaaataacaccatttgcgcccctaacaccatatacggctgaagcagaggcatctttcaaaatagaaaaggtagcaatgtcatctgtatccaccaaatccagatcacgctcaataccatcaactaacaccagcggcgtagaagtacccttgaatgatgaaacacctcggatatagaaatcggccgagctgtttttacccggttcacctgaacggctcatggctactacaccagaaagttgacctgctaatacattagaaatggaagcacccggtacattgagtttacgcatgtcaagtgtagaaattgctcctaccacactttctttcttctgactaccgtaccctacaactaccacttcatcaagcacttcggtgtcaggttccaacaccacattgattacttcctgattagcaagggcaatttcctgttttttgtaaccgatgtacgaaaactctaatacccccccaactccttcaataacgatggaatatttaccatccacatcggtaataaccccgatagaactgttcttaagccagatactggctccgatgatcggttctttgatgtcgctggcagttacaacaccgattatggtacgttttttaacttgctgcgtattttcagtcttagtcacttttagaataacttcttttcctttaataacgtagcttacgttgctgccctcaaatacatcttttagaactttttcaatatttcccgtgctgttataatcgcgtttcgtgttgttttccaaatctgacgcattataaaagaacgtgtattcactgtttttttcaatcagctgaatagcctgtttaatggtcatgtcttctccttttacagaaatatatttctgtgctcccatactggacatgggataaagaagaaaaacaaggatgatacttaacagtatcgaaaaacgacaaaaagtgtgtttcttcattctgtttttttttaagtttaacattaggtttacttgttttaatgattgtttttataaataattatctcattaccatttgctttcatttcgagactaagactataacaaattttctgtaagacatctttcagtgattcttctaagcggatttttcctgtaaaggcagactgttgtttaaggttgattccttccaacttgatgttactgttatacctgctgttgattgtctcaatcaattgtttcaagggaagattcgtaaactgaagactgccatttttgtatttaatatttctcaaccattcctttgttatattatccttcttaatataatatgttaatttttgaaatggttgcatttcaatggtttcatgattttccgctgtaaaatccacctttccacaaaacaaaataatttcatttgtctgctggttttgattctggtgaatatcaaagctggttccttttacttctatcatgccctgattaatgtagacttgaaatggaaccccattctgacgcattacctcaaagaatgaattccccttcagccagacttttcggtccttgagaaatgccttggcatatcgcagactacttcctttctgcatccatactttcgaactgtctggcaatgtgtacagttgggattcctgtgcagtcacttcaataaagtcattcacacaaccggcttgttgtttggcaaaccacaatccagcagacgtgatcaacaagagggtcaccgttgcagctatcatttgccatttgggaaacatttgaaagaatcttcggtttttattatcttgtttatttttgatgtttctccaaatttgctctttcatttgccaatcaatggactcattgcccgcttcgtcccattgttttctaagctgaaaatctatctcatccaattggataaatatcttgcgttgctctttggacatcgtccctgagagcaatctttttatgaacgtttttctattatcaattttcatacctataaatatctttttacgtgcatctataataaatacacctgaaacccttttccccccacatcggatttgaaaaaaatatttttctgattagaattttataaatatctatatgtcattgcgcttataaaatcaaaaaaagtagttgtttttaacaccacttgaaaaaaagaacgtaaacgtgcctttttaccgtttagtcaaataaaaggcttaagttttttttaattaatcattttttaattaattaatttttataactttgtggttgtattcctaaataaatgaaagagaaagtgatactaaatagaatgaaggcaggtgatgaagaagcatttgcctggctgtataaccattattggcaaaaggtttatcattttgctcggctctatttgacctcttcttccgaaatctcagaagctgtgcaagacgtttttctgcatgtttgggaggcaagagaaacctttgacaacagcaagaattttgacggttatctctttattattacccgcaacatcatatttaattattcaaggcgttattttaatgaactcaattttaaaatgactgtattgcaaagcatggaagaaggttatagtatagaagaagaactggatgcacgggatttaaagaggtatattgataagctagtagtccaactacctgctaatcggcaacgtattttccgcatgagccgcgaactgcacctaagcaataagcagatagcagaacagtgtgccataacagaaaaagccgtggaacgtcagattaccttagccttgaaatttatccgagataatcttccgttctttgtgctcttcatgcgcttttaatctgagtcttctgttccctgtttctgccaatggtcggtgcgaaaaggagtcactagcagaccgaacctaggaaaaaggttattgtgagtagtacctgcccaattatagtgcatagctacgggatggagtacctcagaagattgcacccatacttcttttttacggactgtggcagtagttggataaaatatccggtcactgtctgctacaaaaaaccgctccgattctcatttgaagcgaatctctttcctatttccctacaacgaatccgaatagtatttcctccgatgatatgcttcacgtaaacaggcgattccagcaagcacttcctccgtatatctgcttcaagataacctgtgcaagacgaaatcccttatcaaaggctttttgctacgacatggcttagtgtaacgaaaagtcggtaattaccgctaggaccgtacgatttatggccagtgttgccgcctaagcttcgcacaggaaagtctatggagaataatcagcagactctgtagaaagctcataactgcccagttgtaccaaaagaaatggcagatcggctaagatatgtgattattaatgatagtatagaaaagttatactatcaaaatgtattattataacatcttataataatgtgcctcgcctggtagaaaaagattctgttatttatttgcataaggagtttaaagatgtttttatcaataaaatctctaaaagttcttccaatccgatttttactccttttcgtctgcaatgagaatagccttgccacactctcatttagagtaatgacagggctatttcatatttatctattataatccttcactttctcggatattcggttttgttccattctctttattgtttctattcccaatggggagtgaattggaaagttatcttatatccaatacctgatatttccttaccatcaaactcactgaaatcaagagtttgcttgcctgatggtgatttgacgtttgaaagaaccacagcattgtctattataatatcaaaagactgcggagtggcactcttctctcgtgtatctccatcctggttaatcgtttcccattctgaatatgcatacataaccttttggttctgctctatttgcacaggatagcttacttcatccatattgtccatgtcatttttggtctgtccatatatcctgcatactataccggaacaatctgtggatgacacggtcaaatattcataacttttaccactgttcgtacttgaagttgagctgtaaaatctatccaaattaattgtgatacttcttatggattgcttgaaattggctgtaatagtactgttggaaccatgcagggtggcggtagtggttgaactgcctggattttcgatagttacatcaccacctataattgtccagcctgtaaattcatactcactctccggagtagccgtaatactgatcggcttttccacctgatattccattgttcctttcggattagttgttccgccttcacctgcattgatcgtcagtgtgcgttttttttccttgaatccacaatggaaagtatggtcctgacctcctaagtcaacatcgaactctgaagtcccggattgtgcataatcgtatttcttaggttgattagccggccctccataaaaatagttcacctcatatcctgcatcaggatgggcttcaacaggaacatttttgcgtccgtcatacagtcctgctccagtggcataccccccggtaaaatcaacccttccgtctgaagagcgggctgaggtttccagcatcccctcgccttcgatgatgatacgtgtatcaccggtagggaccggttcgtccttttcagaatcctgttccattatctcctcattctggcagcctgtgaacatggccacgaacgccgccaacagtaaaaatttaacttgtttcatacttcattcttttttaaaggtttattataattgtatgtatcatttctttttcttatcgtccagcacgtcggcatcgatgcgggcttcgaacgtcgcataaagcacgaaccggttgaaaaaataataagtattgcgtgtcttgctgaaccttatgtcagcccccatcagccggagttcctccaggtagttgctgacggtccgttcactcacccgcatcctgccggccagttccgcacggctgccggtactttcctttcggatcagcctgtacatccggttgatccgttctatgtagctgacaacggaaaggctcgtcatatcctctcctccagtccggtctgttccaggaatctgcggaaatacccctcctccaggtacaggcatctcatcaacgcctcctttccctccctggcatacacccggcgaaggagcgggaaatccgtggaataaatgttccatctgatcagcccctccgccctccggtcaagttccgggcagtcagttccttccatccgatacctcacggagaggaagtacaggttcttcagcctgtatttctcaagaaaggaaatatccttcgggcatgccttcagcccgtcggcggcgatgcatcttaatacaagctgttcaatctcttcctgaattgtcatatccataccagtatggttttatagttctaccgttctttcttatctcataatgcagatgatagcctgtgcttctgcccgtgctcccggcaaagccgataacagcccctttcccgagctttttgccctccgtcgtatagtaagctgccagatgtgcgtaaagcgtttcaaagccgtaggaatgccgtatgatgacgcatcttccatagcctcccttccttcctgcgaaaacgaccgtaccggaagcggtggcatggaccggtgcggccagctccaccgccatatcgactcccgaatgaaaactatgttttcccgttatgggatgaatcctgcctccatacgggctgcttatcctgaacttgtctttcaggggacatgacagagggagcctgtctgccaccccgtaccggtaaagtatgtcccggcaagcttccaggctttccagacggctgcatttttccagtgccgtatcgagcagttcccttccgttttccccctcgaaagaaaaggggaagaacaatatgagcatcagcagtttcatctggatatcctccttaatatcctgtccgcttcatcttccgttttctgctcctgcaggcttctgaacacttcctccgctcccagaagtgacttgtttttaagtttgtacagaaagtgccggccgccgtttctctcctggatctcgatgatgagccttttcttgtcaggaatggtaaacttgttcatggccaccgtgaacgtccggctctcatgtgcaggtatctcctccgggtagtcgaaagcgaacaggatgttctgctcgatctgctgcaccgccgtcttcttgtgaatctttgcatcctggatatagaaccgcatgaaatccgtcgtatagcctatctgtgtgcggtttgtcagcgtcattcgcagcagcaggatgtccccgtcgatgaagatgtttccgacctcgaactccatgccggcgttcttgtccttcagtcccaggtccaggggaatcctcttcgagattgcctgcctgatcctttccttctgttcgcttgaccgttccctctcgtcaaggatggccaccctttgcgtcttttccttgtcaatgacaaagctgaaacgttccgggaaaggggcataatggagattgaaagtgtagaatttccccccttcgaccactgccgagatgttcgtgtcttccgtaaactctccggtggctttcactgccaggatgttgtccactccctcggccttttcaacctccacatttgtactgccatagtccacataggtgattccggccgggaaaatgaggaacatctgcctgtcctttcccaccggcagtgtatggggcgcgggtgcctggccgtccacacgcacatagctctccaccgggtgggcgttatagctgatggcataggagtagaacttcgtgtcggctgtcaccaccgacagggtagtctcacccgggaaattctcctcggccgctttcaggcgtatgatctccgggcagttcccgactttctcaccgatgacatagtcaccgccgatactgtaatacttcacctcggtagggaatatcaggtgcagggtcttctcgtacccgatctgaaggggcactgccggaagttcctcgatcctctgggctttccctgaaaggaaaacggacaggaacagtcctgttatgtaaattctgttcggtttcatggttttctttcaattctatatctttgtatgctaattttaaagttgtttgcttatgaatacaaatctcaatcagttgctcaaggatcttgaaataggtcccgcttatgtcaagatccttatttgcctcttggggtgtacttttatgctgtacccgaccttttttcacttcacctgttttttccgggaacttcctgtatacgaacaggtacttttcacatcgggcagttccgctttgtatacgggggtcggaattcttctttcagcgataagtccggtaaggtatccaaggatactctatacccctttggcgatgctttcctcttcagtaatgataagtcttttcatttgtttattttttctgaatgaggagtgcaaccgtttcaagctattctcaaccgttctgtcggtaatgtatctgctgcagttcattgcgggtggcatttccatactcaaggaaaagaaaggagagaaagacaatgcacattactgactcccttataaaatccgcgtattcatatactgtttgcaagaaagcggagaagcccataagcacacagtcagccaccaaaaagcaatgaaggtatcctgttgattcatatcatgcaggatctcagtattgcacagcaaagcgctcctagcgcacaaaacagcaacagcagccagtaccagttctcacgtatgaatgcccccaggtggctttcccctttccgtgccttcacttcccgcccgccttccggttctgaagccagacggagaaggattgcctcaaatgtcagtacggcagccattgtgaagaaaatgccggcatggctcaacaggttttccattttgctttagtttttattttcattttcattctttttctttctcatttttcccttgtcctcttcaggcagtcctccggttccgccttcctacccagattccggctgattgttccgtgccccataaagaggggctatcactataagtatacatgcaattcctaatactatgatgaataatagtcggatcaggtaatctgctttttcccaaataattcccatatcacatcgtttttttaattctttatttgatcagactctttcaggaaccgtgccacatcgacggctggtctttcctctccctgatatcatgcaatttatttcatggatgtttcatttttcttttccttatgatattctccagatatacccaacatcttattataatcttttcaaagatgtcagtaaacaagagtatatttaaacagagtaacataaggatagggacagcatatccccaagccccaagcttgttccaaagttcttccatgtcatacagtttttaagttattcaatctgtcaaactctttcaggaagcgtgtcacgccgtcaaccgggctttcctctccctgatatcatgcaaatctatttcatggacgcttctttgcatctgtccggtcccttcctgacgccttcttcttttttccttgaatattcatagtaactcttccaaaagcccaaaatgtgggaaacaatattaagggtgagaagaaagcagaaaagtaagatggtcacagagccgtttttcgataagaattcttccatatcatacatttttttcatcattcgttattgtcactttcagagtccgtttataatggcttacaggtacacaaggcttgccaagtccttgtcttttaccggagtagctaattatcagggcatgtcccgtcacatggacatgaggactctccgcatccaatcggcagaagcactgccggaagctccttgatcctctgggctttccctgaaagaagaatcaggagaagtatccctgtgatgtaaacttggttttgtctcattcttactaaatattatccccagtcaaatagcctataaaagcagtttgccgggattttattacttttgcaattcagttattaattaaaagcaaccgtcatgtctacaaattacaaccagttactgaaagatcttgaaataggttccgtttatgtcaagatccttatttgctttttgggatgtactttcatgttgtatccatttttgtgttatttcacccatttttttcgggagctctccgtatatgaacagatctttttcacattaggcagttctgccctatacctgggtcttggacttccattctccattatgggacctgtcagatatcctgcctgtttttatactcccatgatattgttaacctgtgccattgtgatatgtatttttatatatttatcggtggattttttttctccgctagcatcattatgcatagtactgtttttagaatatctgtttctcattatcacaggggcaatagccgctttcaaagagaaaaagatttctaaaaatgaaatctattactaatgtcttttcatttttctttttattttccatttaagtgcttctagatattccaaacattttattaggatgtcttccagccttcctgtaaaaaagagcataatgaatacgtttaagcagattccgaaaagaatggggagaatatattcccacccttctggtttgttccaaaattctttcatttcatatattttttttcatcattcgttattgtcgctttcagagtccgtttataatagtttacaggcacttcacttcctgattagcggatgccttttcccctttaaatactttttaatttttcgcatggccttctttacaaaagtcccgatactgagaatgaaattttccagtttccctgagaacaggagtaggatatatccattcaggcagataaccagaagggcagaaagtgcatagtaccagaatttttccatgtcatacaactgcatgattattcatttcatcaaactccttcaggaagcgtgccacatccgcagccgttgggaatatcccgtcaaagagcttgtacatcagttccggtctctgcggccggttccgatatactatcactttctttccggcccccttcatccatcccgcttcggaatgtgctgaagccccgcaggggagcacaagcacacatacgtcggcctgccgcatggcatcgaagtccgacctgaatcccgcttctgccagcggatgctccagcgcgtccaggtactcgtctgtctccatcttctcccagttcccgctgatctgcgaccagcggaagtctgtttttctttcagggttcctgaagtcgtacacctcatgcccccgttctcttaaaaaagccacgatccgtggctggtattcgttgctccagctgcttgccacatatactttcgccattgtccttatcctttcctatttaatctgtatttctattttttcgcatccttcagcagtatccggtagttcgtcttgatggtcacctttatctttcggatattcttgcttgcggccgacttggtcgcgttgatgacgctgttcgccgcgcccgccactatctggcttcccatgtcaagtcccccggaaatgcttgtgttcgtcccgctgacacccgcggcttccgcctccttgatggtttccgccttggcatttcccggaacgtatatgccttccatggcatcctcggaatacacctccttttcaaagggaagtatgttccctgccagattcaccgaggtgattttgaccagcacccgttccccgtcgattccggtcacctccccgaacaccggtgtccccttgcggatgcgctgtccgtcgtccgtaaggcagttctccgccagctgcatcttcagcgtcgctccgaccatgaccgtctgtgtggaatgtacgaatgcccgtatgacgttcctctcgtcctgccggacaaggcgcacgctgttgaatcctctccggggagtctcttcggggaccgtgtcctccggttccgtcttccccggtttctcctcctcaccgtccgtctcctccttctccctgaagggggagggggcgggctgttccgtcccggaaagcggagcgcttccgagggtctgctcgttgcgtctgatcagttcccggatgcgctgtatctcgctttccggggaaacggtgtcctccggttcatccattccgtaatttcctccaccgggcatgggggtttctctccggttctccatttccttttccacactcccgagcatgtccttgagcgtgaaattgtccttgatttcagagcgcagcctcacttctccctccctgccgtcctcttttttcggtaatgtggcgatgatcccccataccagcaggatgatcacggctcctataccccccagcgccactattctgctcctttcagtttttgtcatggcatctcgtattgctggttgtatgtccggaagaaaaatccggaagtgttctccggaaaacgtggcgtggtacgtatgacggtgccctcgctgagaatccgtatctttctgacatcatttccgttgatgatgctcaggactgacgagaaggtgacgtgatactcctccccgctgacggataccgagagcatcttctcgaactccgtcctgtagaccactccgagttccagggcgtcgccataccccctgtcagcctggtatttggcgaatatggtgttcgcgtccggcttgttgaccaggaacagggcgcgtgcccggttctcctgcagggagagcctgtcgaaactgttcagataataggccgtatggtagcagtggttctttaaaagggattcatacagcagatcctgctgcatggccttgaagcggagcagttccccgccttcattgacgaccaggatcttgtccatcgcgctgttcaccaccctgtagctgaaaaacagcaccatcgctattgtggcggcgcagaatatgaataccagcctggtgcggaacgtatggttctttctggcttccgccaggcgggagaaatctttaagtatgttctttatgtccatcatatcagctataaccatttgttaaccgttgctttcaccgtggcgagcatcgccagtttcagcaggaaggaaaatatcaccatgagcgttactgaccaggggcgctgctgtacatagttcactacaatcagatcagaaaacacgctggcgatgatgaatcccggatacagcatgtagcacccgaccatctgtctggcccatgtgtagaaggaactgcgggtgtcgctgttgtacaggcaggctatcgccaggggcgatatgacctcgagcagtatcaggataaggtagcgcgtgcacaggaacaccagcatgaggtagtcgtatgcgactcccccgaaactgcccaccgctcccgccagcagggagtcgaaggccgtgtccagcccgttgaccgctatgtcgatgatgtcactgttcatcaggtcgtcgaagagctgctcgatcggcttcttccagatattgtccggattgtagacccctccggcggcgagcgactccatcagcctgtccgcggcgtatgcaagtacggtctcaagcgtgtccagcaacacgggcatgatgcagatgagggctatgcagaggatgtactccctgcccagctcataaaactgttttgcattgaatcccttgccttcgtgaaccatctccttgatgatacccgcaagcttgaatacaaaggtggtaatcacaaatccggcaacaagggcatagaatccctccaccactatcatccccttgatctgcaggtatgcgttgttcagattgctgtatgcctcttccatattatctcagggctcttttcagtctttcatactgggatatgatccgggataccttcgagaccttcctttcctgctcgatggtctgtctctctatctcctgcaggacggccagccgctcggagtcgttcatcttcacgcttgtggaaagtatggtccttgacaggctgatgagccgtgtgttgttgagcatgaccaggtcaaggctggatgtgagcgtctgcagggttgacgtgcccagttttttgttcgtcaccaggtctatgcacttctctgacagtcttccctgtctctctatgattgatttggcggtctcacagctggagatgacggagttgaccttgcgcatcatgtccagtgtctcgtccagccggtctttctgctccttcaggtagcccacctgtttctgcagttccgagaagttcttgacgttctgtgcaaggttgggcgcgtccgccaccgcccattgtgcggatgcggttgccgctgtcatcagcacgagcatggataaaagtagtttcttcatttgttcttgtttttgttgtttcttatttcttattgatgttcccttatatattcctctatggcgtcctccatggacatcctccggttcttctcctcaaggtccgaccatatctccccctccgtctggaacgcaaggaatttctcccttgagaactccaggcgggtgacggtggcgtaatgttcccccagccgcatgaaacactccgaatagggccgttgtcccgaaaaattgttcctcatggacttcatcagggctatctgtccgggatgggtcagcctgaacctgtctatgacggactggtagatgacctccttggtggggagcacgaacagcatgtccgtattggctatgatgttctttgtgtgctcgttctccggcagctggtcgggattctggatgatggtgtacaccgccccgttctccttcctgatcttctgatagcagaaggccacggagctgtgtatcccggttcccgtggccgtatcgaccatctgcgcggtctcgccgtactcgtcaaagatcaggacgccccgtttcctccggtcactgagcagcttcttctgtatgacggtgaatatcatgcccatcacgaggttgctcagaaacctgtcctgcttgatctgcgtcagttcgaacacgatgaacctctttcccgagaagtccgttcccgtatccttgcatacgttctcgtagcgtctgccgggcaggaactcgccgcagttcaggctgaaggactccagggagaaataatctttggggatgtgcttccttgccagaatctcggggtaatgttccgtcacgtggttgtagaaactctcgaaattgtgcccttcacggacattctcgtaatagtcctggatgaaacgggtgagggccacctccttctccgactcgtcctttgtgaacatgtgcctccagtatttctgcacgacccccgagagcatctcgatgcttccgttgtccagttcctccccctgcaggtcgaaggggttgatgcccagcgccgtcctgccgtcgtagtccacgtgcagggagatgtccggatagagcctgcagagctggctgaagctctttccgaactcgaccaccacgaccgtatagtcctgctcgatgagctgctgggtaaggttcagagtaaaggcggacttgccgccgccggttccggctatgaccatcccgttacgggcgttgaccctcttcttgcccgcatcccagatgtcctttctcagagggacctggtacatcctgtcatgcacatagatgccctcgctgtcattcctgaaactgccgcactggagaaagaagcacaatgctatgggcagggtggtcaggaacaggtatttccgcggcatcaggtggatctggccggggacgcaggcgaaatgcaccgcagccaggttctcatatccgggaatataatacccgagacgggccaggttgagcgtctccctgatctttttgtcggccttctccagttcggcctccgactcgtcgaacacacagaccgagaagaagctgcgtaccagtgtctcgttctcctcaaggatttcctgctggagctcgtccagtttctggtactgtaccttgatggacctgctcatgccggaattgcttccataaatgtcgatattgcgggcgatccgctcgcgcagccgtccgttcccctcaaagaaaaccacctggttcacgatgtggttgtacggcaggtacatcccaagccgctccagcatcggatggtacagcagggagccggcgggaggaagggagtcgtcccgtacacaggaatccaggctgccgtcagggagaaagatctcatcgcagacggcgaaacagcgtgcccgtttctttcctgtgcggagttccgtgtcggcatgtatgtccacaaccgcccccggggcgtcgaacagggtggtgtatccggccgtgaagtcccgcatttcctgccctgacatcggggctatctccgtatcacgcatgctccggatgatgccgacggcgttgtcaactccctcgaggaattcatcgagcctggcgaggtcctccttatggaggttctccttataggacaggggcgaggatatgtaggccttctcaagacttttgagtccggaaagtacaaagtgcatgacgcaggtatggctgacatacagtcgtccccggaaatgccgcgcatcggcccggtcaaggaaagaaccgccggcaatgtccggacagtacctttccttgaggaacacatcctgtttgtgcacatatgtgccgtccgggagaaacttgaaggcttcccggaacatgccgtccctcctgtcgatatcctccggagtcagggaatagcattccggttcccggagttcgaaagaaacgcatatgctgccgctgcgggtcaggacgacgccctggccctccgattcactgacaatgtcaagtatgctgtatgcctcttctgatttcattatgctccttttttgttaataccctgtttatgtccagattactgatgtttatctcttttcccgtctccttgaacttttggggccgtgcctttcttttcagcttgtatagaagcagcggcagggtgggcagcgagatgacgagcaccaggaccggcaggttccagttgcctgcggatatccccgcacggatgccgaggaagaacaggacgaaagcggcggaacaacagccgacgaatatccagtagtccccggaaagaagcccccgtatcatgcaggggctctccagtccttttctgatcctgtatctcatatcgacaggctgataccggaaatggcactctttacggcggacaccacgactgcggccagcaatgcaaagccgacataccagcccagtgcgacgaatccttcctttcgcgtgcccctgttctccttgtcgatgatattgtcccattgctggataaggcccagaatgatacctccaagcataaaaccgccgaacacgggcagtgtaaaactgtccaggacatcattgatcgctccccgggcatcctgggcgaatccccggagtgtatatgatgcagacatgacagtcagaaacaattttttttctgtaaaatttctcattttgttattatttgttaggtttgatagttccgttatagtcttctccttcctgccagggacggacacttacaccggagagaatgagtcccccttctttgcccagggacaatgcatatccgtatctttttccggcctccagggtgacggccggcagcagccagccgtatgtgttctcctgaaaacggatcacgaccctgttgtttcccgccttgcccggcagcagaaggacggtgttcccatccgaggggaccgttcctttttcccctgccgagagtttgccgccggcaaggtcataagtgccgcctgtaggaaccccctccacactcagagtgcacgcgctgctgccctctatggtgaattccagcaggcagagcaggtgttccatccctatgtccgctgaccggttctgccagtccaggcgtatctccccggatgccaggtagtcggtctgggggaccaggctcaggggcagctcctttcccgggatggcggcgaaaggggagaatgcgaacagcctgcagggggtctccgtgagtgtgacctccggaaagatccagccttccccgtatgttacatgcagcgggtttacggctccggcataaccgccgcccgtatcgtcaagcagcaccattccgaaatctttcacaagggtgggacttccgtcagttccgccacggctggagcagctctctatcctcagtccggccttcccgccctgcgggaagggctcccgttcacccgagcagcccgcaaggactgccggtagcaggaacaggacaaccggtttgtatatgtctattttcataaccgcattcaattgattttttgttattgttcgatgtcaatggaagtctttcccggctgtacaattttcaatgacagcgttttgccgctttcatcctgtttgagggtcacaagaccggtcctcctttcctttgccggattctcgtcatagcttaccgatgagccgttcacatgaatccagctgtcaccggatgcgttccaggaaagggcttttgtagagttgcccgtcttcttgtaacttgttatgtccaaaatgaatgagccggccgatgagtcgtccggatattcggtatggctggttccgccatccgcatagctgaaataatagcttaccggagatccctcctgggtgattgtggccgtggccgagcttcctccgtgacttgccgtaaacacacagctccgggatgagcctgacgggttttccgacactgtcaccgtattccctgaaaggaggaatccttctgctcctccgctgagggaggggacagccgtctgtgtgttttctgccactccgttgacgaacactccgcgtgaggctcccgccacaagggaagatctgccgccctgccagccgatgacggagggatttgccgtcagggtgaccgaccagccgccataattacggtacctgggctcgagtgtacggtccgacagtacctcgaaactgtaccgtgtgtcattcgacacgatcctgccgtcctcgtaccatcctgcgaactcataaccgccgttcacggacgcggtgaccgtgcaggtgcttcccatgtcgtacaggcccgcacctgtggtgcttccaccctgcggatagtcaaggacggttatccgtatcttgtaatctatccggtagttgtggattctgccgggttcggtggtcatgtcggaagtgccgcgcagcttcatgtccggggttcctgtgagggttatgtaattggaggttgtcgtaagggtctgggcgggtatggtcatccggaataccgtggtgaggttcccggaactgtacctgtacatagcatagcttcccctggtctcgtccgtaacggtttttccggtaagcaggttgaaccggctgccgtatttcacattttccatacgggcgccgtccacgcggtcgcttccttccacccggacctccacggtcgacagccggtgctcgaaatgcagcggtatcgtatagtcctgtattacgtccgtataggacgctgtcaggaaatcggctgaaagccatccggacttttcctgctggtctcctatggcatgggatatggcggtgatgtctgtctgcccctccttgaaaggataatatacatagaagtcaagatcggtccccaccgtcacaatgatgttgtcctcttccgttgcgggtttgaatgcccgaccgtcataggtgtatttgttatttgtggcccagtacacgccggtcttgggctcgatggcaaatacgcctatggagtttcccttttcgaacgtgccttcctgggtggcacgcgtttgggcgacggtaaaggtgacacggccgttttccgggcatggctcctcctgttccttccggcaggaggatacggacagcaggacaaggaagccgcagattatcgttgttattgattttaccatgattgtttttttaggacggggaccggagtcccctgttgttctgtaatttatttgaccggtacaagcgttacgtcggattcgcttgaaccccatggctcgatggttacggactgtccgttctcgcctccgatttccgcgtcattggagcgcatcgttatcgaatagatatatctctttccggcttcccagcttatctggggaatggaataggtataggttgccccgtcgatgacgacctccatgctgacttctccggatgccaggctcatgggatagattgcggcggcgaagtctaccgacgggttcccctgtgccggaatggtcgtgttgggagtccatgagagttccgtggatgtcggggagaagatgatccttccgttgtcgttcaggttcattgtccccgaggttccgaacttggccgccttggatttcagtttcgcggatgtcaggttgccgtcattatgatattccggagaaactttcagacggatgacgagctgggacaatgcatgtttcatgggaatgacggcatccgtttcaatgaccgacacctggtttgtgctctttccccacatgtagtcgacagaggttcccgcattgatgggaacggggactttggtaccgtcagcgacggcctggttgtatgggtaatacgcccatatcgtcgccttgtccgaaagaagatagacgggttttgcctggctccatccggccgctgtttttgtggacttgttgttctgcgcgtcataacgcggatagacgtccccccatccggtggccttgtacatgaacagccccatggcgtcatttaccgcccattcggttttcggcacgaagccggccctcgtgtccgtgccgactgtcggcacaatattcagtacggaggctgaaaccccgtctgtttccggttgttcgtccactatttccttgttgctgcatgaagccagcatcccggcggcaattaccgctgccgaaatcataattcttgttttcatttttcttgttgatttggttttgttataattatagtcttatggaaattccgtttcgggggtgtcctcccagtccgggatgatgaccggcccgccaatctccagttccctgccgatgtgcaggtccagctccagcgagatctcgtcaccgtcgaatccccgcagatacggggtcaggtcaactgactgccgttcattgaatacggagtcctcctccttcatcagaacctctacggcaagaatgttctctgccgccggactgaatccgaacacataaaggcccgccgtccatacattgtcggccttctttgcgaaggaggcggtcgcacttgcggttccggtcctttcacgggaggccagatacctggccgtagagattcccgaaagggtacagttcaagccggacaacggtacggtgttgccggacacgttaatctttatgttcagtttctggacaaaagccgcaggctgtatccttacccgtttgggattccggtattcaagcctttcactgaaggccgaggaacagcagaatttctgtacctctgaaatgtgcgcctccccgtcaatggtgtcagtccggacggacagacgcgtctcatgatagtcattcctgtccagcagttcatagttccccgtatagaacaggaacctgtatgccccctggggcaggctccagcggagtgtatcctgtgtgaacgttgttccttcggaatacggcacatccgttccgaaagggatgacgtgtctttcctgggggacaggcggcttttcctttattccgctgaaatcgcaccaggctacaagttctccttcccggatgcagaagtcctcattgaaattgcagccgccgagcattattgcggggaatgacgcaagtaccagtacttttctgtcaatattcatctttgtataaattataagtttcaataagcgtgtttatttcggggtccagccgtccgcgccatatcttgccggcatcctggtcgcatgacctgacatatgacttgacggcatcctccttgcgccccaggcggctgtacaggatggcgagcaggtagttccggtctgatgtgtcccgctgttcccgcatgatctcaagcgcacgggcgtcatagccgagcgacatgaggcagacagcggtattatagtctgccgggtagtgctcgtccagcagggcaagagcctgtttgtacctcctgtcctctatcatccgcacggcagccatataggtgctgtcgatgaccggcatcacaaccgtgtcctgaatcatgtcccgccggtggagatggaacaggaattccactccgcgcaggagaggataatgcttttcccggattctcctgtaatcctccggatattttctcagggcgtgctcacggatgtccggattccttgtttcctccatgatccggagcagttccggccggtgtctcagggtgtcgtcttttgcgacaagtccgcgcagcctttcccagtcttccccccgccatgcagggcggaagatggtgtcaacgccttccgtatcctccgtacgtcttgcaaggtacttcttcagttccgtcgcacgtcccctggacaggaacagattcatccccgcatcaccctccggagatgaggtcgcggtcatcagcacgctgtctatgaggaactctcctgtatagtttatgctccgtatcgccttgaacaccttgtcgatttccgacctgttgtttccggtttcctcccggaactcggtactgcctgtcttataggccacgtatgcgcgcaggcttacctcgtccttgcgggtgacaatcttctttttatagcggggagtccggtcaaggaactgcaccatgctcgatatgaaataggtgatcgtgtccgacggcggaagcggggtacgtgtctcgtccttggaaaggatcagtccgtcaagcgtcagatctatccttttcgtgttttccgtggccgggagctcctgcttgtagtaatagacgaacttgttcccttcccggatgaccgtatccagacgggccggctcatacggaaaacgcacatatttgtcatacatggcaccggcctgttcctttctcttctggttctccgccatcttgccgtaatcggtgaaacgcctcgtgatgacggcggaatcttcaggggagatgctccgggtacggatcttatatccgccttcggcaaacatcctccatctggaagggatatatttcccttcaagctccctggtcatccagtaggcgggaagatgctccaggattgaattgtagccggcgatggctctccggttctgctcgacacgccagttgaacagggcaaaccgggcattggccttgtccgaccagtcaatccagcgttctttctgcagcacctcgtgcttccaggcctggaagtattcctcttccagttcggccagcgccttcctgtagcctttcccgtcgaacagtttctgcaggtacaggctgtcgggtatgatggagttgatgaacgcctggtagcgcatatagcctcttttctgcatcttggcaaagtcagcccctgaaaggaagatcctgtccagatataacgtatccgaaggcttgtaggccaccggggccagctggagttgccacttgttgctgaccaattctcccggaaccgtcacgacaaaatccaggtttatcttcccgttgcgttcagccacctgcttgcttctggccataacggtaatttcggacagttccacggaagtgatctcctcaccggtcacgctgtctttctcggcccgcgtgacgatatgccgctcacccttgtcgtccgtccatgctatctgttccggcaccttgcaggccgtatccgttgtcgcctccctcaccccgggctgcgagatgcgcacgcgtgccagacggtgctccgatccgcaggaaaggagcaggcccgagagcagtgcaaacggtatgatacgttttgtagtcctcatccttcccgcttaaaaaagatacacgacattgagagctgcacgggtcggaagaaaatgccagccgtactcctgtccgacaaggtccccgcagcgtttgcacagatatttgtcataagccagccatacggcacccgcaccggcttcccattcaaggttccagcgcctgcctatctggtaggccttcccgatacttaaacctactccgtagccttccccctcgtagcggtacttgttgccgaacaggttccccacgctgtaggtgccggccgtaccgtacatgccgatgaatccgcccatgtagctttccagcagccagtagcgtactccgggggccgcatagaaattgcggaactgccggttgcggccgaacttgaacgggttgtactgcacgggcaggtgcagtgaccatttacggttcagcgtcatggaagcctccagattcaggttggtcgttgccagaccgatcacattggtacgcaatgagtaggactgtgccgataccgacaggaagaatgccagcagtcccgcacacagaaacagcttttttcccgtattcattctcatgcctcctttgctttgatgacggtcacctcccaggccgtcagggtattgaaccaccggttctcccactggcgggcggaacagtcaaatttcacatgcacagtctggccggcttcaaccgcataccggtcgatgttggcgttcatcagctgcaggcacaggctctgcggtctgctttcctccgtctcgaggacaaactcccggctcttccactcgttgccggaagttttgccgaccccatcctttatgggaagtacggcgataacttttccttgtatttccatttttaatcggttttatttagcagaatgtcacaataggcatctgcatctattttttgagattgtattttattgattttgaatccggcttctaaaaaatcagaaagttcgatgcctgataagaaaaaagtccttatctcaatatattctccgggcattgttaaacctgacatctccttttgttgccaatatctaacccatgtatgagcgttcttattgagaaggttgaatataatttgttctatactcattcttaatttaatattaatcatcttcaacgaaagtgttagtcgtgtttatcacaccagcagaatcaacgctcttaccatcccggataaacactttttctcgcattaactcttcatagtcatatcgtgacattccgattacacacacacgaccatcaacatacaatttacatttcattaattcagtttcttctatcgtaccgataacatctatttgaattgttcttttattcataattcattcctttctatatcgtttatagtcatatccagctatttccgttgaaaatcaaaaatggctttctgtagctcttcactatctttgggtatatgtgtttcatcaatatgacaatagcaatatttgctgccgtaactgcacacgttgaatgtattgttcagaatctcgccatattcccaccgtgcattcggattcggtatcctaccttcctggagccactgccattctgttttcatgttctctcgataagccatgtttttttttcgcttctcgtcccttttatctgatgcttttttgtgctcttttcgtttagctctaagcatgtcctttgcagtttcagagtctttgtgaacttcgttgtctttgtagtatgttgctttctgcccgtgaaaacaattagtccaacgttcttcacctaccgcatcagcgttaggtacataaccctcttttgcccattgtaatgccgttaatgcttccataggtcttattgtattaaatccaatttaatagcttcaactttcttaatacatctaccatcagggggagttattgtgaatcctccatatcctttgactgattcctgccggtatgcctccgcagaagatggaggcagcgcttgacaagacgcagccgccgggtctccacgcagggaagcacctccagggtcaccaccaccggcgcgtcctgccaggtgattcgcggaaacatctctccgaactgtcctttggggatgtaaagggcttcctcgccggtccacatccccgtgtccctttcgggaggacaggtgaaaagatgtcccgtaccgttatagtccacggcaaaccagtatgtgttcctcatcctttctctccgtccttgtctttcccgggaaaggaaactgtgccttttcccagcaggttcctcacttttgcaatggagatgatgcatacaagattgtccggctttcctttcacatggatgtaccaccttccggaatcgtttcccgcatcgaaatgcaggggttgggtacgcggatacctggcatccagttcttctatccggcaatgaatctcctctttcagatcatccagtgcgttccggtccttgagcaggcagtccttaaacttcaggatatggctctggagctcgctgcctttcctattgaccgacgcataagtctgtatataatgtataaagtacatactattatgattttaacggtttattctatttcctcgccccataaatccagatcactgggggcggtcctgatctgatacgcaagccacagcatgcccagtgcatacagggccgcaaatgatatccacaatactgtcatataccacctccttttatctgccggttcagactgatgttcctgccgtcacccatgcctgagtaatacgcggagcggtcggttccggtctttctcggatgtgcctttgaagtgccggctcctattttttccaggtacttgtcaataagcgcgtcatggcagcatgttagggcggtttcccgtgcctcaccttcggaagtggtggactccttcagacgcatcagcttgcggatacgttccatggttttatccggtatgtcattgttctgtttcatgcttgatcgtttaatcctcatcaaaatcatccttctgtaaatcgtagccggtcagtacggcttctttcaacaacgttttcaggtcatctgacaggccggatgacagcagtcttccggcaatctcttccgcacgttcctcaaggcttttcttttcctccgtgcagaaagtgaccgtaccgaaccgggtggcgtatttcctgccttctatagttatgtcctgggagaagttcacgcgggcggcattgcacctgacagattccctggccagacgctttccgaaccatccggcaaaggccatgaggtccgtatgggaaccggcggccctgtccatgcaacgctcaaggttctggctcatgccctcctcgaacatgaccctcgcaaacgttttcccggcattgcagccgttccggactgccgcatcccggtatatttcctcaaatgttttcatcgttctgtttttttgctcttcatatttcatgtcccgctgccggacacccggtcttctgcaggaattcgttaaaatcattgcacctggggtacaggcgttccgactcgttcaccagtatcacgtcttcaggaaggaagctccgtatctttcccagtgccccgcgtcccggggcgtcgttgtcgagaaaggcgtgcaccttctcatactttgaaaggaaatcctttgaacggtccacaatggccgtggagttcaatacgcacacgtccagctttccaagtgcgggcatctccggatgctcccttgcgtactgcttgaaactgagaaggtcaaaaaagccctcgaaaacggcgcaggacctgttgccttcactgatgcaggtaatatccttggcgtaggcgcaccccttgaacatgctgttccgcaattcgaaaccccggtggtcgttggcgaatccgagcgcgtatttctcacgcggattcctctcgaaacagtagtggacctccacacagtatttacggacaatctccccgtcaatgccacgtgaggcggcgtagtcaagcagatgcctgttctgaacgggaatgaccttcaggacggtcatcggggcggctgccggaagccttcctgacaccgtttccggtttccgtatcgaaggcatggaaagctgcggggaggtcctcatccttccgagttccttcatggcctgcggaaaggagcagttttccacacgcatgaccagatccaccgccctgccatacgtaccgtccccaaaatcataccagcggttctcctccctgaaaaccttgaagctcggggaagtatcggaacggaagggggaacggtacatgtcatagccgccataccgtctggacggctcgtaaccgtaatgggagaggatgtctcccaacgggattgaattggcttcctgtgatgtcatggttatgtcgctttaatggtattttccgtttgattcctgccggtcctcacggatgggcaggatgagttctttaaatttataaatttattcccgccatcctcgcggacagcttttcagggtaattccatcatattgtcaacacggcgtttccggcttctatgcggaaactgcctgcctcatacggctcaggataaacctggtggggctcttgatcctcttgttcccccaggtttccttcagggcggtgtccagcaccatgggtgccacggaggcgagctgcaggatctcctgctggtccctcaccgcgacccccagaagctcgagcgtcttgcggcggttgcgcatggtttcctcctgcctcctctgccggtcggcctctccgtactcggcgttgtatttggcgatatagttttcaacgagaggatacaggtagttccccttggtcaggtggaaatcactctgcaggatatcctcgatcgcctttccgaccgggaattcgggataacaggccgaaagccggtatatccagccggtataatactcgtccactcccagatacttgagctttcccggaagagaatccctgtcctcatccttctccccttcaccggaggcttgtgccggaggggttggggaggatattttattttcttttattttatacggtttattttcgcgagttttgtccgcttcttcgcgaagttccttttcagcggcgaacaatgtgcgtatgcgagtcacagcctgccggatttccttcccatcctccggaagggaagccggagatccgcattcatgtgccggggtgtcctgctgttcacaagtggcatgcggtatggtggcggactccggtgacggttccgtttccagcagaaggatgctttccggaatgccgggcttgcggtggatggccttgcagatgcctacatacagttcctgtatctcctcactggtcagaatctgtttgtcctgccacagttctttgttgaaaaggcccagttcggcgcagtagtcgatgatgtccgaaacctttttctcatccatacgggaatagtccgagatgtcgaacagaccgtcggcatccataaccatatagcatccctcgacacggtagatctcgtttacaatgaaatggaacacaccccagccttccattccaaatttattttttagtctctttactttcggatcatagaaatgatcggtttcgaacctgaaataggtgaaaccctttttagctgtttttggcataagctttatatttaaagtggataatacatcagctggccgaaagctcgaactccttgggaatgtcgggatatcgggagagcagaccgcaggatctgacatgatccatatagttccgctgtatgtcagcggaagtcaggatgcggtgtttttcgtatagctcaccgttgaaaagtccgacttgtatgcagccgttgacaattcttgtgacatcttccaaagaggcattccagtaagaggccaccgcctgcgccgtttcctcgcaccacagcaggaggtagctcccgttgtggagtgtctcgtttacgagataccggtaaatgctgtaaccggaaaaaccgtattggcgggtgagtcttctgactttcatgtcagaaaattgggaagtgctgagctcatagcaaggatgtgttccgcattcctggcgccgtacagcccgtgacaggcggcggcttgttccgtttgtaaagctttgggtattcatatatgataatgtataatgtttactgttaagaattatgtatatgacggaccgggctcccactccttgggagaatgggaccggtgattatctggccggaggaatatggtgcttcttccggacgaactggacataattgtggacggtcttctcgcagacgtgcggaaagtccggataatgttcccgcaagtagtcgccaatgcggctgctggaaatggagggaaaactggtaaggagggatgcgacggcctgctcgtaggcatggagtttgtaatgccgttctttgtgctggaggacttcctccaagcttagggattgaagatgtcgtaccgtattacgggacacaccaagacgacgggctgtccgcgcaatgttgattccccgtgaacgaagatcaaggatattgctccataatatgtatttttctgttaaatttgccgcatccataatctattagacagatttcgtaactgggacattccagattacgaatctttgatgcagctaaattaccgccctcagcgtaggctatctgcacgccaaagaatccgaaactaatattccatagtttccagaaacctaaatcgggaatttttttcatggtatgtgtgttattgattatcgttggggtagagattcaccacagacggccccaggctgtctgtggcggatgtttagaatctgccggcagtgtcaatcatctctaccagcttttcattgaacttcttgttctttatcagttcttccaaagtgagatgcatgcgatatctccagtaatgtcttgaattggcaggtatgttgatacgttccgcgttcacatcgggatagcggatttcttcgtctattgacagccagtcctgaaaggaaaggatacacagcaatgaaggacattccagatggtggcgtactatttcctcgcaaacccatcctggggctgaaaccggaacttctccccagtgtcccattacatggttgtagtagcggcaggtctgttcataatcttcttcccaccatccccgcagagtagacatatcatgagtggaaatagtacaaactgagcggtacggatattcccacacgtgaccgaactcatgtttgggattcttgggcatacgttggatttccagactgagtatttgcaactgatccattacccaaggcacacagtcgggtaccattcctaaatcctctccgcacaccagcatagaagtggcttgtgtcaggataggcagctttttcatcgcttcctgataccagaactggttatggcgttggtaataataatgattatacagacggttgaaagcgtctttctccttccagttgaggcgcccgaagatgaaatcattctgaacggcaattcttggatgatacatggatgggtgtttgcggtcgggaacaaataatacattgcttatcaaggcatatactccctcgcgtatatggatactttcttcatctttcttatcggagaagtaagtctccactttgcgttgggtatcatattccggacgcatttcataaatgtcatcgtgaacatgctgtacgaatgtttcttttacaaaggcagctttgtcaccaaacatcttgtttagcatctcttcgttgatgaacggtttggtcatgaagtccttttggaacggcagcccgtaactttgaatttcgtccacactcataggcaatgccggtacaaactgtcccagcaaaccatgtaccgaatgagatggaatttcccagatacggaagaaaccaagaatatggtctatgcggtaagctgtgaaatactctgccattttgcggaaacgcttctgccaccattggtagttgtcttgttccattacctcccaattataggtgggaaagccccagttttgtccgttcacggagaatgcgtcgggtggtgcgcctgcctgaccgttcatgttgaaataatacggctcaatccatgcctccacgctgttgcggctgatgccgatagggatatcacctttaaagataatacctttttcgcgggcatagtttcctgcatcaagtaattggatatgtaaatggtactgtgtgtagtagtaaaaggcgatttcttcataacaagagctgtccggtgcgcataaggctgctatttcttctgccttgtactctgtatgctcaggccattggctgaaatccggagtaccatacagatctcttagatagctgaatgcagcgtatggcagcagccaatgttcattctcttcaaagaatcttttgaattcatccgaagccagcactttccttccggtttgttggaacatcactttcaagtaggcacgtttggcattgttcactgcttcataatctatttgaggaagagcgttcaattcttgccggcgggcttcaaaaacagccagcgcttccttatccttcatcttacccagctggttcaagtcaatatacatcgggtggaatgcataaatggaaatgctgttgtagggataagaatccatccaggtatgggtaatggtcgtatcgttgatagggaggatttgtacagcttgctggtgggtctttgccgcccagtctatcagtttcttcaaatctccgaaatctcctactccaaaacttttctcactacggagagaaaatacagggatagccgttcccgccactttacgggccgatgaagtgaaatgaacttctgtttccggtgtcaggtagatttctcctttttttaattccggattattaagcatccggttgtcgtggttctcccattcctctacctgcttgctgtcggcgttgcaggttacgaacttataacttagcggaaattccaaagtagaaacattcagtgtgatggtccactcgttaggctgtatttcttccatcaggacagtcttttgaatatcccaattgcctaaagccgggcaatccccgctgatagccagcacttgatgcttatgatgcaggcaagggcataaggcccggaaagtaatgcttccatcggcgcttgctgtgacttttatagctgcttcagactgataatcaccactgaaggcggaactgtataagtaagattcagccggaaggtctttccagaaatcatttaatatgtagtggcagtttttctttttcccgggacaaaacaaatgagccatggttccgctttcacggcggatgcactgtccgtcacgatatactccatagcggtaggaaacaggtacgcatgcagggagatccggcatttcagcttcaccttcccaatgttccccgtttggagtgcgaaggatgataggttcactattgtttccgtccagtatcacccccagttcttctccccaggctgtacggtattcaattcgaaatgtgagtttcatgttattatttgagttaaatggtttaatgtcccaaaattaagactttctgtcagaatatcgtctttcatccaattaatttataagaaaaatgaatgaggttatgtttgttaccggcggtgaactattacaatttctgcccatttcatcgaaaaaaagagtcggtatgagtatctgtttcttcgggcatttaaaagaggaaaaatataaatgggggcagattgattttcattgataaaaaagccccgatccagagaaaagcaggatcggggctacctcaaattgtaagatgtgaggatggattttgattaaaaaataatgaatgaaaaattacgcgtctatattcgcatatgtcgcgtttttctctatgaactcgcggcgtggagctacatcgtctcccatcagcatggagaagatataatctacgttggcggcattgtcgattgttacctgtttcagaatacgcgtttcagggttcattgttgtttcccacagttgttcgggattcatctcacccaaacctttgtatcgctgtgtatggattccgttttcttgtccgtcaccatatttttgaatgaatgcctggcgcgcttcttcggtgtagcagtattcactgatttttcctttgctgcatttatacaatggcggattggcaatgtacaaatgtccgttttctataatttccggcatatagcggtagaacaatgtcatgataagggtgtcgatgtgagaaccatcgacgtcggcatcggtcatgatcaccactttgtgataacgcagcttgtcgatgttcgcttttttgctgtcatcatttccgtccacaccgaaacggacacccaaggcggtgatgatattattgacctcatcgctttcaaaagccttgtgccacatcgctttttctacattcaggattttacccctcaaaggtagaattgcttggaaggcacggctacgtccttgcttggcagaaccacctgccgagtcaccttcgaccaggaatagttcacattcctccggattacggctcgagcagtcggccagtttacccggcagtccgccaccgcccatcggactctttctttgaacagattcacgtgccttgcgtgcggcgatacgcgctgttgcagccaggatcactttgtcaacaatctgttttgcttctttcggatgttcttccagataatatgtaagcgcttcgcctacagcttggttcacggcaccactcacttcgctgttacccagcttggtcttggtttgtccttcgaactgcggctcggctactttcactgaaatgacggcaatcaagccttcgcggaagtcttctcccgaaatctcgacttttgctttttccagtgctttggtatcttccgcatatttcttcagtacacgggttaatgcgctgcggaaaccggcctcgtgtgtgccgccttctattgtattgatattgtttacatacgaatgcagactttcacgatagcctgtattgtacatgatggcacattcaatgggggtattgtttttttcggtattcagataaatgacatcatcaatcagcgcttcgttgttacggttcaagaaacgtacaaactctttcactccttcgtccgaatggaatatttctttcttgaagctgccatcttcttctttgatccggcggtcggtcagtgagatggtgatacctttgttcaagtaggccaactcacgcatacgtgcctgcagaatatcaaacttatattcggtaacagtgaagatggtatcatccggccagaaagtctgttttgttccggtaatatcagctgttcctacttcttttacagaatacaaaggatgtccgcagctgtattcttgctggtagatcttgccgccgcggaatacctgtgtggtcatgtgagtagacaaggcattcacacaagaaacacctacaccgtgcagaccacctgaaaccttgtaagaacctttgtcgaacttacctcccgcgtgcagcacggtcattactacttccaatgcagatttcttttctttttcgtgaaagtctaccgggataccacgaccattatcctgtacggtaatggaattgtcttcattgatggtgacttctatatgatcacagtagccggccaatgcctcgtcgatagagttgtccacaacctcataaaccaagtggtgcaatcccttttcgctgatgtctccgatatacatggcgggacgtttacgtacagcctccaaaccttccaatacctggatgttactggccgagtaattgttttcgccgtttatcttttcttcttcactcatgtttgatttaattatcttaaatattagctttcaaagatacgaaaaattgctgagacaggcagcttttatggactaaaaaacgtaaaaaagaggggattggacaggtttggaatgaggtctgtccgtgaacgccgggaaaagtatgggagtgatgtatttatttcgagggtaagtcttctggaaattaatgggtctttttttccttcaaatccttcatcgacgcttaacaggctttttatcagtactttatcatgtacgatcctcttctaaatccttcatgaatgcttcggattcttcagactctgtttttcgcggagcgaggatttgcgcttcttttagatgttatgtttgcaatatgtattgcttgtgttttatgaagcgcataaaagacaaaaggccggattaaaaaatcctgcctattttatcttttagtttaagactttgcttaagcaagtttgctaatgtaagcagccaattttgacttcaagttagcagccttgttcttgtgtatgatattggtcttagcaagtttgtccaacatcttctgaacgcccggatacattgcaacagcttctgccttgtcagtagttgcacgaagttttttaacagtgttacgcattgtttttgcataatatctgttatgaagtcttctcttctcttcctgtctgattctctttaatgatgatttgtgatttgccatctcgactaatctttaattttgttcttttattatttttatttgtagcccgtgggggaatcgaacccccctttcaagaatgaaaatcttgcgtcctaaccgatagacgaacgggccgagccttgattctgccgagccttagcttggcttgctttcggagagtgtttttctcttttgcggttgcaaaggtaggaactctttttgaattgacaaaacattcggcatattttttttataaatacgtgcattttcatctaaaaaccttatttttgtatgtcccaaagatacatatatttgtgtggaaaagcaaaaaacgtattccggacaacgattatctagtatataaaagagagaaagagtatgcttcaaaagacggtgggaattgtacttcataccttaaaatataatgatacttcgaatatcgttgatatttatacgcgcgagaatggccgtgcttcttttcttgtgtctgttccccgttcacggaaatcggcggtgaagacggtattgttccagccgctttccatgatagagtttgaagcggattatcgtcctatgtccaatttgtatcgtataaaagaagcgaagtcgtggcatcctttccgcacgttgccatacgatccttataaatcttccattgccatgttcttggcggaatttctgtatcgtgctttgcgtgaagaagcggagaacgggccgttgtttgcttatttggagcattctatccggtggctggacgaatgcgacagaagtttctccaattttcatttggtttttctgatgcgtttttcacgtttcctcggtctgtatcctaatacggaggattatagggaaggatgtttttttgatatgctgaatgcctgtttcgtgtctgtccagccattacatggtgcttttttgaaaccggaggaggcttcacgtatcaaccttttaatgcgtatgaattatgaaacaatgcatctttttactatgagccgtctggagcgtaaccgctgtctggttattatgaatgattattatcgtttgcatctgccggattttccggtgctgaaatcgctggatgtgctgaaagagttgttctcgtgaaatcctttcttatcaggatgtgttcatgtttcgcgccttttttatttatcgtttcactttagtgatgaagttgtttcactagaatgatgaaatctcatcactagagtgctaaagcttcatcactaaagtgaaacgataaatgaagcgggaagcaaatgggtattcttcctatcttgaaagttaagacggaaagcaggtgcaatcttttgaccacgatattgtatgactcatctttgtcctttagcatgatggtcaaagacatcggtccggtgcgggtgttgtggcggctgaaggtgctgacagcgtactgaaggagctactgtcagccttatgcgttgtatatcagctttttattgtggctgaatacactgaaggatactttgaattccagagcattggtgaagtgagaatgataaacggaaaaagtttaaaatgataaactagccttttatttgcttgggaagctggatagggtactgcatacgtttgcttctcactgattttataaaaaacgaaacttctgtccgtaaagatgaatcggggcagaagcttcgtttcttgaatatggattgccggagtattatcccagtaattctttcactttagccgagatggcacgtccttcggctttgcctgccaactttttggtggcgacgcccatgactttacccatatcctgaggaccggcggcactcacttctgcaataatttcttttaaagccgcttccagttcttcgttactcatttgtttgggcagataggcttcaagcactgccacttgggccagttcggcttctgccaagtcggcgcggccctgaccttggtaaatggcggctgaatctttcccttgttttaccagtttctgcatgattttcaatgcagcgtcatccgtcaaagtgtcgttggcgcccggtgctgtctttgcttcaaggaagaattttttcacattacgcaaagtttccagtttcactttgtccttggctttcatagcctctttgatatcgttgctgattacgtcaaataaatccatagttcttttctattttagttgttaaaatgtgatcgttattccgccgttttcggtatcgttattgaacgtttcctcttcttcggctattgctttggactggatactttccaacacagttttggtacgttggaaagtaggggttgtttccaccatactgataatatcatcattgtccagatcctccagactgaagatgtaaatgttgtggcgtttcttcttgttgctgttcttgaaggtgtctttgccgtagtaatctccacgacgttcatctttgcgctgttcctcttcctccagctcttccagtttcttttgttcctcgatggtgcgtttgttcatcatgttgtccatgcccggtacatccttgatgccgaaaccggtggcaagtacggtgaacttcacctgctcttccagcgactcgtcaatatagagcccccatttggtttccacgtctttaccgaatttgctcatgaagtcatgaacctcattcatttcttccatcatcaactcgctcttggtgctgaaagagatgttgaacaggatcttcttcgagttgaagatatcgttgttgttcagcaacggggaatggagcgcatcattgatagcctggctcacacggctttcccctttgccgtatcccgtactcataatggctacaccaccgtcttttaataccgttttcacatcattgaagtccaggttgatggtaccgcggatggtgataatctcggcaatactcttggctgcgatagataaagtgtcatccgctttgccgaaagcgttcatcacgctgaagtccgaataaatatcacgcagacgttcattgttaatcaccagcagggcatctacatgctggctcattttctccacgccgtccagtgcctggtcaatcttccggtttccttcaaaaaggaacggaatggtgacaatacctacggtgaggatatccatatctttggctgtcttggcaatgatcggagccgcaccggttccggtacctcctcccattccggcagtgataaataccattttacagccgtcgttcaacattccttttacatcttctatgctttcttcggctgcttcacgtgcacgctccgggcggtttccggcccctaatccttcttttcccagttgcaacttcacgggaacgggggattcggccaacgcctggttatctgtgttgcacacaacaaatgttacatcgtgtataccttctttatacatgtgatttacggcattgccgccgccacctcccacaccgattactttaatgatagtcgggttttctgccgggaaatcgaatggcattatagtttcatcagacataatcttctatattatattaaggtgatgtaattcgttattattcttccagaatctttccaaacaagtcggtcagccgtttgatcggactgttggcttctttcaaactcttgatttctttttccaggtcgcgtatttggttcaaagcttctgctactcccaaatcgcgtgctttggccagttgcgacagggcatttttgtatttgcctgcctctttcagttcttttgcgtttcttatcaggttctcgcaagtggcttttcgcagcttctcctcttcctctgctttcttggctgccgctgctgctctggctgcttcttctttctctcttttccttttgtcttccacattctcgccgctttcatcgaagagaggtacttgtacgggtttcataggacgttccggacggtaacagttttcttttccagctcctagtaaagcgatgatcgtattgcatgtaccatcttttttcagttccaccataccgcctttcagacttagctgactttctttggccattctaaccttttctattttggtacggttactgaatgcttcctccatattctttagattggcggcaccaccggtaatgatagctcctgccagcagtttgtcttcatatcccgaaagaacaatctggttccatacattggccagtatctcattgatacgtgcttctacgatgtcttccagtaagtgtgactcaatactgcatttcccgtccagcgagtaggtagggttgtcatctccgtcctccgacttgtcggcataagcattgccgtatttctttttcaattcttcggcatcttcctcttcaatttgctggctgcaaatatctttggtgatgttgctgcctcccaatgggatgactgccaaatggcggagtatgttgtttttgtaaacagatacagtagtcgtatctgcgccaaagtcgatgaacatgcagcccgagcgtttttcactgttggtcagtacggcattggccagggccaacggtgagatgatgtagtcggctatttcgattcctgcctgtttgaaacatttgtcaatgttctgcttcacgctgctgcgggcgatgatattaaggaaacgcccttctatatgatcgctgggaactcctacaggatcggccagcaggttgatgcccactttatattcctgaggtgctacttccagtatttcctggtctatgatggggacttcgcggttgctgtccataatggagtcaatcagttcctgtgaaatcttggtttcttcttccagatgacgtacctccgtattacggatggtgcgtagagattgtcctccgatgcctacatagacctttccgatagaagcctttaatgtcgattccagtttcttgataatcgaagtaaggctttgtgcggttttatccagattgtaaatcactcccttacggataaaatccgaagagttttcgctggcgagggccagcacttgtatgcttccgtccgcatgtttctttcctgcaatacctgtgatcttggaggatcccagttctattgctactataaaatctgttgctgccatatcttacttctcttttttagtacaaataatctgattattaaattccagactgatgcggctgtacttgttccagcctacttggttcagtcctttctcataaaaagtttttagtttctcgaacttttcctcataattcccgggcttgcctaagaatatgatatgttcaccaactcgtggaaccagttccagttctttggcctgtgtcacattgatctgctctatctgggcatcccatagcggatgggcttgtagaaaggctcctaacgtatatagttccttgacggcaaaatcacgatccacgtatcctgtaacaacagctacgtgtgccgaactgttgggtatcggcataatttttcctttattgtcaatataatagttgtctccattgtttgccatcactctgaggatggggaggcgctgtgtcacttcgatacctattttgcatcccggtgtacggtaacattccacattttcaatcaagggatgttggctgagttcttcttccagcaggcgggtgttgatgtcgcccatcttcttgcccacgggggagagtttcttaccgttcagtaagcggagtacttctttctggctgatgaagccatggtctatactgtccttgataatcaattccatacccttgcaaacctgatcggcaggcttggtgttgaaagcggtaacggctacaataaggtaggcggttatcagcaacagaaacaggagtatgagaattttctttatcatcttttattcagtaatccgcagatttggggtacatagttatctatgtcgcccgcacccagggtgattaatacttctatatctttcttgctcagtacgtctagaatttcttctttcttgcacatgctcttctcgatacccggacgcagatggtcgtaaatcagtttgctggtgacgccggggatgggttgctcgcgtgccggatagatatctaccaggatgacttcgtccaacaaggaaaggctgtcggcaaaatctttgtagaaatcacgggtacgtgtgtagaggtgtggctggaaaatagccgtcagcttcttgtcccggtagagggcacgcatggagagtatgctttgctttatctcggaaggatggtgcgcatagtcgctcaggaaaactaccttgtcgttctttatcttgaaatcgaaacgacggtctactccgtggaaacttgccatacctctctttatttcttcatcggtcaatccgctcatctgcgctaaagccatggcagctactccattctctatgttgatgctgacggggacacctaactgtatattggggatatttcccagtggtgatacgtaatcaaagaaaatctcaccgtttccaatacggatattctctgcatgaaagtcaccctcttctttagaataggtgtacagcttcacgccattctgcaaggccggttgcagttcgatgcctttgcgtacaatcaatgcacctcccggctggatgagtgaggtgtatttgcggaagctttccagataagcctctttggttccgtagatatccaggtgatcgggatctgttgcggtaatcaccgatatgtagggagagagccaatggaaagaacggtcgaactcatcggcttcaataaccatgtattcactactgtcagacaacagcaggttggtgccgtaattctttgagatgcctcccaaaaaggcgttgcatcctacatgggattggtgtaacagatgggctgtcatggtggaagtggtggtcttaccgtgagtgccggctacacaaagtccttttcctgcatgggtaagcattcccaatacctgcgaacgtttatgtatctcgaaaccgttttcccggaaataggtaaactctttatgtgtgtcggggacagccggagtatagacaactaatgtagttgccgggttgcggaatgcatccgttatcagtcccgtgttttcttcgtaatggatggctgctccttcttctatcagcttttctgtcagttcactgggcgtacggtcatatccgcctaccttcttgccttttgacaggaagtagcgtaccaatgcgctcatgccgatgcctccggcgccgatgaaataaactgattttaatgtgttaacgtccattttcttttctgtatttatcagccagcttgaatacctcccgggcaataacgttggctgagtcggtaaaggctaatttagcaatatttgtacttaaacttttcagtgtttccggctgtttcacggtttcaactgctttgtccagcagagcttctttggcagcggcgtccttgatatagagcgctgcgtttttattgaccagcgccagtgcgttcttggtctgatgatcttcggccacattaggcgacggaaccagaatgacgggtttctgcaacaaacagaactcagagatagaacctgcacctgcacggctgattattaaatcggcagcactgtatgcggcggccatatcactgataaaatcggttacatggagcattggtaactcaccggcttgggctactgcggcgcgtgcttcgtcgatatatatttttccggtttgccagataaactgcgcgccggatgttttaatcttgtccaaaccttccatcacgcagttgttgatggtgcgtgctcccaagcttcctcctacaatcaggattgttttcttggatgggtccagcccgaaagagcggatagcatcttcacggctgatgtgatggttgcgcagtccttggcggacggggttgccggtcaggataatcttgtctttttcaaagaaacgttccatgccgtcgtatgccacacatattttgcgggctttctttgccaatagtttgttggttactccggcataagagttctgctcttgtatcagtgtcggaatacccatcatcccggccattttcaaagtgggaccgctggcatatccgcctacacctactgctgcatgtggcttgaagtccttgatgattttacgtgccaatagctgacttttgaccaatttaaaaagaaccgaaatattttttaataagttcttacggtcgaatccggcaacaggtaatccttttatagggtatccggcagcaggaacgcgttgcatctccattctgccttcagcacctacgaacagaatttccgcttcgggatgttgttccttgatggcgttggcaatagagactgcggggaaaatgtgtcccccggttcctcctccgctgatgatgattcttaaattttcttccataattcctttttagtcgaattattcgcaaaagtataaataatacttttaaaatgaatggtttatattatatttcttcttccggctcccgcttcccggccgcattcagtaatgccttcaagtcatcggacagcgagttttcctccgacgggagggaagtggcggctgtgtcacctgacggaagtgtagtaatggcttcctgcatggcggctactatttcctggcgccgttcggccttggctgccagttcggcttcttccaacgcctgttgctcggcagctttcttctcttcttgctcagctacgtagcggctgacacttaatatcataccgatgtaggcgcagttgatgagtgtagaggttcctcctttgctgataagcggcagaggttgtccggtgacggggaacagacctacggccaccatcatgttaagcatcgcctgagataccagtagcagggcgatgcccatcaccagaaaggcaggaaaacttttttcacttcttcgggctattttacccgcccgcatcaacagccagatgtagaggatcactacaaaggcgcctcccagtaatcctaattcttctatgacgatggcgaagatgaagtctgagaacgcttgtgacaggaaatcccgttgtacactgttacccggcatctttcctatgatattgctggaggctatagcaatattggcgtgtgctatctgggcatccttgtctatatcatatttggcagcaggaacggcttctttatcctcgaagaaacctttaatgcggttctgccaggtttctacacggtgcatcatgggaactttgttcagtttatgtgtaggcataaccatcactatgcctacgaaaagtatcaccacgactccgacagttcccattaacttggccaactgtttccaaggtacccggccgatcaccatcattaaaaagactactccgaacagcaatgctgcggtagaaccgttttcgggagcaatcagaatgaaaacaactccggtgatccacattatatatttgaatgctttcggattggcgttgtcttcttcctgaaacttggatagaataaaggcggtgacaataatcacagccatttttgccagttcggaaggctggaactggatgccgaaaaaggtcatccaacgggctgcgccattgacacggtctccggtaatcaatcccatacccattacaaatatcagcaaaacagctgatataggcagcaggaagaagggaagtacacggaaatatttgcaggggatgttatgtaccagcaccacaatgcacacacctaccatcaggatgacactgtgctgggtgataggcccccaatgatccccacttttgtaggtaagtgtgctggcggcactaaatacctcaacgatagagatcaggcaaagaaacaggaaaataatccagattactttgtcgcccttgaacaagtcttttatcagatccattatctatataccttaatattatattacaggtttcttacacattccttgaactgctcgccacggtcttcgtaacttttaaaaaggtcgaagctggcgcagcaaggacttaataatacggtttcacctttcttggccatccggtaagcagcatctacggcatccttcatgctttgtacatcggctacaggcaggccgaacttgtcaaagaaagcatgcaatttctcattgtgtaatcccatgtagatcaatccggtacatttttcttttaccaagtcggcaatttcgttataatcgttgcctttgtcttttccacctaatatcaggatggttttggttttcatgctttgcaaagcataccagcaggaattcacattggtagctttggagtcattgatgtaatctactcctcttacccggcagactttttcaaggcggtgttccactcccttgaaatcacccaaggcctcgcggatgcattctttgcggatacccgccaggttggcagagataccggccgccatggagttaaagagattatgggttccggtcagtgccagttcttcctgttccatgttgaaagcgattggttctgtaaaataaactttgtcctgttccacgtatgcggcggttccttcttctttcctttcggcaaaagggtagtaatggccatgaatgccatatttatgtaattcacgctggatgacggggtcatcgttccagaagatgaaggcatcgtccggagtctggttctggataatgcggaattttgcatccacatagttttgcatctggtgatcgtaacggtccagatgatccggcgtgatgttcatcaatacggcaatgttggcatggaacttgtacatgttgtctaattggaagctgcttaactcgattacataataatcatagttgtattctgctacctgatatgccagactttgaccgatatttccggctagtcccacattcatacctgctttcttgaagatatgataaatcagcgaagtcgttgttgtttttccattacttcctgtaatgcaaatcattttggcattggtataacgtcccgcaaattctatttcggagatgataggggtaccttgtgcctttaatttaagaatcatcggggcatcattcggaatacctggacttttgatcacttcatccgcattcagaatgagagattcggtatgtttgccttcttcccattcgatgcctcgctcgttcagcatgtttttgtatgagtccttaatcgtggacatgtctgaaacgaaggtgtcgaaaccttgtttctttgccagaacggctgctcccgcaccgctttctccagctcctagtatgacaattcttttagccataatcttcgtttatcttatctttaatgtaataatcgtaattgcagcgagtacgatggtgacaatccaaaagcgtaccgtgatttttgattcatggaatacgctgttgggtttcatgaacagataactgcaattggggtctaactgtgctaatgtagtacggaaatggtcgtggataggtgcacgtttgaatacgcgttgcaaatgccctttcttttttccgcttttgaaatatctcacctgtagaataaccgaaaggttttctaccaagaagattccacagagaataggtataagcaactctttatgaatgatgattgcaaataccgctatgataccaccaatggtcaagctgccggtatcgcccataaatacttgggcgggaaaagcattgtaccaaaggaaaccgatcagcgcgccgataaaggcgcagataaagattaccagttcttcactgccgggaatatacatgatattaaggtatcctgcatattcgatgtggctggatacgtatgccaatatgcctaaggtaagaccgatgatagcagaatttccggctgccatcccgtccatcccgtcattcaggttggcgccgttagatacggcagtaactacgaaaatggtaactaatacgaaaataatccaacctacagtttgggcattatctcccaggaagcctacgaaatcagcataatccaaattattattcttgaagaaaggaatcgtagttttagtggatttctgatcttgttctttgtgcaccacttctacaatttctccccctctttgtatttctacgttctcacggataacaacgctcggacttaaatataaggtgagtcccacaatgagtcctaaacctacttggccgatgatcttgaatttgccgtgcaacccttctttgtctttacggaaaaccttgatatagtcatccaaaaagcctaatgtgcctagccaaatggtggtaattaacattaatatcatgtaaatattatgcagtttccccaataaaaggcaaggtatgagaattgcgacaataataattatacctcccatcgtcggcacaccaacttttttcacattaaaagggtctatagatgcgtcacgttgggtttcggttatttgtttacgtttgagcaggttgatgaaatattcaccgaagatagccgagatcaacaatgataaaatgattgccatcaatgaacggaatgaaacgtaaccgaacataccggctccgggaaaatcaaacttttctaaatattgaaataaataatatagcatcttttggttggtttattcattagcaaaaatatctcttaatacttctttatcgtcgaaatggtgctttatacctttgatttcctgataattctcgtgtcctttcccggcaactaaaatgacatctttagcttgggctagcatacaagctgtacggattgcttctttacggtcggctatgcttatcactttacgcatatcctctttagtcagtcctgccagcatatcattgatgatttcctgcggctcttcaaaacggggattgtcagaggtgataatgaccttatcgctttgctttaccgcttcttgtgccatcaaggggcgtttgcctttatcgcggttgccgccggcgcctactaccgtaattacattacctttgccattcagaacctcgtgaatggcattcagcacattttccaaggcatccggagtatgggcatagtccacaatggcggtgtatcccttgggtgagcgcagtgagtcaaaacgcccggcaacggggcgaagagtactcaatgccagcagtacctcttctgtttttttcccaagcaggcaggctgttccatagactgccagcagattggaagcattgaagcgtccgatgaactgtacattgacttccacattatttatatcaagcagcattccttcgaatccatcttccagcacttttcctttaaaatcactcaaactgcgcagcgaataggcgtgtacctttgctttggtattttgagtcatgaccaatccgtttttgtcatccagattggttaaggcaaaggctgttttaggcagactgtcaaagaatgcttttttggctttcagatagttctctacagttttatggtagtccagatggtcacgggtaaggttggtaaatataccgcctgcaaattttaaaccaccaattcgtttttgtgcgactgaatgtgagcttacttccataaaggcatatttgcatccttcatctgccatgcgtcccagcagtttgtttagtgtaatagggtcaggggtggtatggtcagttggaatggcttcctcatctatataattgcatacagtggaaatgagtcctgttttatatccgaatttacggaacatattatataataaggtagcaatagtagtttttccgttggtgcctgtaacaccgaccagttccaatttcgaggtggggtcaccgtaaaacgtagttgctagtttcccgacaacgtcttccgtgtcgttcacttttatgtaggtaacattttcaattaatgtctcaggaaggttttcacataccactgtacgggctcctttttctattgctttttgaatataagtatgtccgtcagtctgcgtcccttttacagcaatgaaaatatgaccaggctctatcaggcgtgagtccatgtttattcccgaaatctcttgggccatatcacctatgatttcattgactgttattcctttaataatcttttccagtttcatattcttcctgttacactgttaatttaatcgtaattgtatggtctgtcctttgcgcaaagtgttgccggccgggatactttgtgacttcactttaccgatgccggtaatgcgggctttcaatcccatgctttcaagtagatagacagcatcctttgcgcccataccaataacacttggtacaagtttattgttaatgtcttttttgttgaataatacattgtccggattactagtcacatttccccataccggtttgccttcggttgattgttccgaaactccggatgaatttacatttattcggttcagtacataatgcgccgcacttatatccccgtttttcacatccggaataaggatagaagttgagtcttttgcttctttcaaatcttgtgccagatgtttggcaaatacgcgttcggcaattttactgaacacgctgccggccatcaaaccacccgaggcggggagtccaggtttctggatggctacaatgcaactgtatttaggcgcttctgaaggaaaatatccacagaaacttaccaaataacggcgtgtgccattagtgtatccggctttcccttgtgaaacctgtgcagtaccggttttcccggatacatggaattgcttggatcctgctttctttcccagcccttcgctgacaactttttccaaaattgtttgtatctcgctgatagccttgggggaagcgatggccgggttgagtatttcaggagcaatatcttccaccacctgcccgtctttgactattgatttcacaaaacgaggcttgaccattactccgttattggctatagcattataaaatgccagtgtattgatggggggaatttgggtttcatagccaatagacatccatgccagtgcagtacgtgaccaattgctcaagtctttgttggggatgcggatgttcggcttgccggcaccgggaatatcgagatctaacggagtggcaatgcctactcgatgcagtccgcgtacaaacttttccggattatcatgataatgatcatcgatcaaccgtgatacaccgatgtttgaggacaccatcaatgattttgttgtgttgatagtgccgtagcctccacgatgccagttgtggtctttcatatagcgaccgtgcatcatatagactccgttaccggtttctaccaccgtttccggagtgatgactccgtcgtccagtgctaccagtatggatgcggttttgaaagtagagcctggctccatcatgtctgagatggcgttattgcgtatttctctgtaaatgccgtcattacatttggtcatgttgacgatagctttgatgtctcccgtctgcacttccatcagaatagcgacgcctacagtggcgttgatttctttcaattcatctaccaatgctttttctgcgatgtcttgcatacctacatcaatggttgtaatgatatcatagccatctacaggagggatgtctacaatgttcaggtatttgttcattaccttttgacgatgagtgataccgtttctgccttttaatatggaatcgtatgaaagttccagcccgttctttgcaccttgttctatatcaggaaacatatctcccaatgtacgcatagccagtgagccgaaaggctttttccgctgattgaatgcctgttcatggaatccgcctttgtatttgttcagattaaatacgggcagacgttttgcttctttatattgtatataagaaatgcgtttggggtagagtagccaactgcggctctctttttttcttccgtttttgatgtgctgcttgaaaaaggcggcacttttatcagggaatatttcatgtaatcctttgcagattgtgtcaagatttgcataaagaactgagtctttgatatgttgtagcttcagccgtgtcttttcctcttcttcggtttcgctcttcctcttatttatcatgaagtccatgtaaatcttatattcgggaaggctgcttgccattagctggccgtcggatgagatgatgttgccacgggtaggacgtacggtgacgttttcttttacaaaacggtcggctacgtctttccagtattgacgctcggcaaacatgatgacgccggctttgcagataatggcaatgcctatcaacaccatgaccaggatgatgaaggagaagcggagcattatgtttttttggttgggcatcatgggcttagtctttctttattaaataaggacggttggtagccgtttgtaaggggctgtcttccgtcgaaatatattcttcaatacgtgattggcggctcttttccatcagttcggaagaacgtgtcaatgcatcgtatttgatatcgatcaaatcttttttcaacttatcaatttcaatgagttcctgttgactgctataacggttgtctatgtatagtacagtcaggatcatgatgagaatcagcaaacgggtttgtcttttgaagaagtcgtttgcaaggatatctcctcccaatatgctgcggatagacatgtgcttgggcgaagcagattgtccgtctttaggttgttgtgcattttgtttcagttcttcttccatctcgttatctcttttctgcaattctcaacttggcgcttcgggagcgcggattgcatgtcacttcttcgttgccggcaacaataactttgctgttgactaatttgaaaggtgtctgtacattaccaaagaaatcctgttcggccttgccttctatgttcccggttttcatgatattttttaccatgcggtcctctaaggaatgataggtgattactaccagtctgcctcccggtttcagtgctttggttgctgcataaagcatttctttcaatgcttccatttcctgatttacctctatacgtaaagcttggaacacctttgcgagttcttttttttcacgttcccgcccaaaaagcggtttgatgacttcaagaaaatcaccgatggtgacaatttgttttacccctcgtgctttaacgatggttgatgccagtttgcggctgttctttaattcaccatataaatagaaaatattagccaaacgttcttcgtcataggtattcaccacatctgctgctgttatgcctgcacgtttgttcatccgcatgtccaatttgccctcgaaacggaatgagaatccgcgttcggagtcgtcaaagtgatgtgaggaaactcctagatcggccaaaatggcatctacctcttccacgtcataataacgcagaaagttggaaaggtagcggaagttactacgcacaaaagtgaagcggctgtcgcttacaatatttttctcggcatcttcatcttggtcaaaactatatagatgcgcggtgctatccagccggcttagaatttccttggaatgtcctccgccaccgaaagtggcgtctacataaatacctccgggttgaatgttcattccgtctacgctctcgtttaataataccggtacatgatatatctgttttgcttcactcattctatttctacgttgttattagttcccataatttcttccaattcttttccaaagtcctccggcgtgatgaagggtttgtctgctagttctttagaccagatttctatagtgtcgtccaatccgataaagcgtacatcttgctgtattttagctaatttcaaatatcgttttggaatcagaaagcgcccgtttccatccaatgtgataacttctacatccgaaacgaactgacggaaaatcatttggtgtttggaattccaacgattgagcttacaacgtagttcattcatttgttcgttccacacattttcggggtaaagaaccagacagtcttggtaggtgtctttgcgtaaaatcaagcattcttgggaggcagcttgtaactgcttcctaaatacggcaggcaggaacactctgccttttgcgtccgtctttgcttcagaattcccaagaaatcgcatatctacaccttattatattgttcaaggtgtaaaattacacaattccccacaattccccacaatattttaagaaaatatttcgagaagttttcaacaggctgttaatgtagctagtagcttggtaaacagtacgtttaaatttaatgattttatgataaaaaataatggaaagagttggctgtcggaggttgaaaaacgaaaccaaactattgcacattcgtttttattttgcgcaaaaatgaaagaatttgtatagtttcatacacaaaaactcttaatttctttagagattaagagttttttctgtcataaattgccaatataaaaaaagataagttacttttgcatggaaaagaacgtttgcaaaatgactgacgactctatatttttaatcgacatagaaaagatattgaaaacgaaagccgggaaaaaatataaatatattccccgttttgtcgtttcgtacctgaagcgtattgtgcatcaggatgaactgaatgtctttttaaaagactccaaaaataaagtcggagttgactttctggaagcttgtatggagttcctagatgcaaaagtggagataaaaggtttggaaaacttgcctgaaaacggtaaatgtacttttgttagcaatcacccgctgggaggacaggatggagttgctttggggtatatattgggaaaacattacaatggtaatgtacgctatttggtcaatgatttgttgatgaatttgcatggtttggctcctttgtgtattcctatcaataaaacaggctcgcaatccagggatttcccaaagatggtagagacagggtttgcctctgataatcatatcattatgtttcctgcggggttatgttcccgtagacagggtggggaaatcaaggatttggaatggaaaaagacatttgtcactaaaagtattgaaacgcatcgtgatgtggtacctttgcactttgagggccggaattcagactttttctataatttggcaaatatatgtaaggcccttggcattaagtttaatattgctatgctttacttggcagatgaaatgttgaaaaatcgtcataaaacctttaccttgaccattggaaaacccattccttggcaaactttcgacaagacaaagaccccggctcagtgggcgcagtttgtaaaagatgtagtctacaagctataatggacaaaagagagaataaaagatatggaagaaattattgcaccgattagcaaagagattctcaaggcggaactttccgaggataaacgcctgaggtttacgaataaaagtcataatgaaatttatgtcattacgcatcaggattcgccaaatgtgatgaaggagattggccggttaagggaaatagcctttcgtgctgcaggtggcggaacaggaaaggcgatggatatcgatgaatatgacgtgatggaaaatccctataagcaattagttgtatggaatcctgaagcggaggagattttgggaggctatcgttatctcttgggggatgaggtgcaatttgatgaacatggaaagcctttgctggctactgctcacatgtttaatttctcggaagtttttttgaaaaaatatttgccttatacggtggagttggggcgttcgttcgttacattagagtaccagtcaacccgtgccggttccaagggattgtttgctttggataatttgtgggatggtttgggtgcattaaccgtgattaagcctaatgtgaaatatttttttggtaagatgactatgtatcctagttatcatcgtcaggggcgtgatatgatattatacttcctgaataaacattttggtgataaagataagttgataactccgatgaaaccgctggaaatagaaacagataagaaaatgttggaaaatcttttctgttatgattcttttaaagaagactacaagattttgaatacggaagtgcgtaagctgggatataatattcctcctttggtcaacgcatacatgagtctgtctcctacgatgcgtatgtttggaacagcgattaattatggattcggagatgtggaggaaaccggaattctgattgcggtaaatgaaatcctggaagacaaacgggtgcgccatatcgaatcgtttgtaaagcaacatcctgaagctttgaaaataacttcaggcgctcatcccatactgaccaaataatcggactaatagtaatattgggggaaacattgtcaggtgcagataaaatttacaggattcatcttgctcgcatctgacaatgtttttattatactgccggcaggctgttgcctttgatcttccggtagaggtcgagcgcatatacgtctgtcatgcccgatatgtaatccagcacagcttgaatttttccatataaagtaggtgcgttgacattgtactgtccggatacgcgattgatcagtagttgtgaatacgctttttccggagagcgcactgcattgatcatcaggtcaatcaaggtactgataactctgaaccctgccaattctatgtccagtacatcactggaacgatagattctttgcaaggcaattgcagaacaattctcataggcctctttcaatggactgcaaatgtgctttatcagtgcgccttcaaactccccggctaatatctttttttcattttcagtaaatactcttgtgcattcctttattagtgcaccgatgaccgaagaacgtaaataagctatctgttcattgacgtctgttacaatccggcaaacttcttcaatgcgtttttttcttttctcatcaaagaacagcatatacagtcctttggtttcatcatgtgtcagaagttttaatttatgcgcgtcttctatgtccatcatctgataacaaatatcatccgcggcttctaccaggtagactaacggatggcgtgcgtagcgtaaaggctcatccggcttgctgagctggatgatgcctaattctctggctattttctgataatcagcctcttcgcttaagaagaaaccgaattttgatttctttcctgccaattgtgaggaaaaaggatattttacgatggacgccaatgtggagtaggtcattacgaatcctcctttccgtcttccttcaaattggtgggtaaggatgcggaatgcattggcatttccttcgaagtgggttaaatcatcccattccatcggtgaaagttcttttttcaatgccattccttgtccttccgagaagtaagttgaaatggctttttctcccgaatggccgaaaggtgggtttcccagatcgtgtgccagacatgcggctgaaacgatagaacctatttccgatatatgggagtcgaccaagtctgggtgctttttcagaagctggttggcgacatcgtttcctaaagaacgtcctacacaagacacctcaaggctgtgagtcaaccggttgtgtacgaatacgctacccggtaaaggaaatacttgagttttgttttgcaaacggcgaaaaggtgctgagaagatgagacggtcataatcgcgttggaattcggaacggtcatctttacgggcctcgtgcagttcttccatgccgaagcgtttatttgatattaattgtttccagttcataattcaggctttatctgtttgcaaaagtaagaaacttccgtttaaaaaactgtaaacgcttagataaatccatctaaatgtgtaaattcgcactttattaatcatgtggtaatgtgctgatttgttaatatgccaattggctgcgccaggtctggactgtgcttgttgtctgcaaattattagcattgccacataagcatattgataaattgttaaaattatgaaaatacaggtaatcaataaatcaaaacatgctttacccgagtatgctaccgggcaatcggcagggatggatatccgtgctaatcttgacgaaccgattgtgctgaaacccttgcaacgttgtttggttcctacgggactttatatcgcattgcctgaaggttttgaagcgcaaatccgtccacgtagcgggctggctattaagaaaggcatcggagtcctgaattctccgggcacaattgatgccgattatcgtggtgaaatttgtattatcctggtcaatttgtcatctgaggattttatgatagaagatggggagcgcattgcgcaaatggttgtagcccgtcacgaacatgccgaatggcaggaagtggaagtgttggacgaaacggaacgtggtgcaggtggctttggacataccggaaaaaagtaaaaggaaacaatgaatagaagattgaaatatgtgcccatgctatgtgtatgtctgataggcatgcttgtttcatgcggtacggtgaagagaacttccggggtgtccggaaataaagctgttgtggaggaaaaggatccgcttactccggagcaacgtcgtaaatacgactatttctttttggaagcgctccggatgaaagaaaaaggtgacttggatgcggctttcgaaatgtatagtcactgtttggacatttatccacaaggagctgctactttgttcgagatttcccggttccatatgtttctcaatcagccggaaaaaggggaggaggctttgaagaaggcagtggatgccgaccctaagagtttttggtacaagcaaactttggcagcctattatcaaggtaagggaaattacccgaaagccatttatgtttatgaggatatggcgagtcagttcccctcacgtctggaaccgttgatggctttgattgatctctatacccgtaccaaggattatcagcaggtagttaatacattgaaccgccttgaagccttggatgggaagtctgaacaaatcagcatggagaaattccgcatgtatctggccatgaacaatgatcagcaggcatttacggagattgagaatttggcgaaagaatatccatatgacatgcgttatcttaccattttgggagatgtctatctgaacaacggtaaggaagaagaagcatacgaaacttatcagaaagtattgaaggaagaaccgggctatgcgccggcgttgctttctatggcttcttattacgagaaaaaagggcaggatagtttgtatcaggtacagttggatactattttgctgaatgataatgtggatagcgatacaaagatgaacattatgcgccagcttattctgcgttctgagcaaacaaacaaggacagtacgaaaatagcaggcctgtttacttctatattgaaggaaaaacaagagaatgcagatatcgctatgttggcggcccaatatcttctgacgaaaaagatggataaagaggcaacccctgttttgcaccaagtgcttgaaattgatccggaaaatacgccggcacgcttgcagctgttgagctttgccattcgtgagcagaatatggatgaagtaatcaaattatgtgctcctgctttggaatatactccggatgtattggaattctactattatatgggattggcctatcatcagaaagagaaaacagacgaggcattggaggtttttaaaaaaggagtgaatcaagtaacagataaaagcaataaggatatcgtttctgatttctatgccattatgggggatctttatcatataaagaagatgaatgtggaggcatatgccgcatacgattccgctttggtttataaggaaaacaatataggggccttgaataattatgcctattacctgtctgtagagcgtaaaaacctggataaagcggaagaaatgagttaccgtaccgtaaaggccgaacctaccaatggtacgtatctggatacctatgcctggatactttttgagaaaggtaaatatgtagaagcaaaaatttacattgaccaggctatgcagaatgatggaagtaaaagttccgttgttgtagagcattgtggagatatttactacatgaatggagatcgtgaaaaggctttggaatattggcaacaagcggaaaaattatccaaggagcctcctcaagaaggtagtgaagaacgtagtgaaaaggaattgaacttattgagaaagaagattgtacaaaagaaatactttgcagaatgatgaaacgtgtctgtttttatttgtttagtgctttgctgattatatttatttcttcatgttcatctacccggagtatgaagaaaggggtatctattggcaatttatccgagtcggaatatatggaagagctgattagccgttctccgggatgggatgcaattactgcgaaaatgtcattggccgttgacttgaacggtaaaggaccgactaaagtaaatggtacgttgcgcatgaaacgtgatgaagtaatccagctttctatcgctccatttttgggtattgaagtggcacgtgctgaaatatctccggacggagttttagtgatggatcgtatgaacaaacgttatgtacaagtcccttttgatgaattgaaaaatctggcaaaggctgatttggattttcatactttgcaggccttgtttatgaatgaaatttttcttccgggaaaaaaggtgctgactgtctgtgatatttcgtcctttgctgtgcgtcctgaaaacgaaaatgcattaatagaagtaaaaaacggcaaacatttcgcctaccgttttcgtaccaatacaaatgatgggctgctgaaagaaagtcatatcggcttgtccggtacccggtacgggataaattggcgttatgataagtttcgtccgttggagcagaaacaatttccggcgtctatgacagtgtcttttgaaggagcgaagcaaccggttacggcagtgttcgaactttcccgactttctacaaacaaagattgggaaagtcacactgaagtgcctcaaaaatacgaaaagatagaattgcaagatttgctaaaacagcttattaaataatgaaacgtatcttcttattattcatagcctgctgctttttaagtactcttttagcgcaaagtactcggaaaataagggagcttgaagccaaacggaaggaacttcatcagcagattgccgagtctgaaactctgttgcaatctaccaaaaaggatgtgaaaagccagttggataaccttgctttactgacaggtcagattgaggagagaagaaaatatatcaataccatagagagtgatgttcatatattaacaagtgagatcgcctctttgcagaagcaactgaataaacttcagcgtgatttgaaagacaagaagcagaagtatgagatttcggtgcaatatatgtatcgtaacaagtctgttcaagagaaattaatgtttattttttctgccgagaacttgagccagacttaccgtcgtatgcgttatgtgcaggaatatgcaaacttccagcgtcttcagggaatggagatagaacgtaagcagaagcaaattgccgctaaaaaaagagaagtggaacaaactaagaatgccaaacagaatcttttaaaacaaggtgaggccgaaaagatcaaactggaaattcaggaaaaggaacggcagactcttttagcgaatctgcaaaagaagcagaaaggtatacaaaacgaaataaggaagaaaaaacgttcagcagagcaattgaatgcccaaattgatcgtttgattgagattgaaatagagaaagctagaaaacgtgcggaggaagaagcccgtaggaaagccgctgctgaggctgccgcaaaggctgctgcagctaagaaagcggaaaataaaactacgggaggggtaacccgctctaaatctacggaaaaaaatgaggacacaaggaaggccgctccggtggagaagttcagtctgaacaatgaggaccgtcaactgtcgggtagttttgaacgtaatcgaggtattttgccggttcccattaccggcccatacgtgattgtcagccattacggacagtatgtcgtagatggtttgcgtaatgtgaagctggataataaagggattgatatcaaaggtaaaccgggagcacaggcacgcgccgtttttgatggagaagtttcggctattttccaatataatggcttgaacaatatattggtgcgtcatggtaattatatctccgtctattgcaacctttcttccgtatcggtttctaaaggcagcaaagtcaatacacgtactgttcttggaactatccatacagatagttcgggtaatacggtcttgcattttcaacttcgtaaggaaacggctaaacttaatccggaattatggttgggaagatgaaaaagataagttttctttttgtatttctgtactttattactttgttgtttgtcgtagcttgttcggaaactggagagcttcctgtagctcctgttcctgaaattccttccattactatcccttccacggaaaatacccggcttgttttcacttcggacggaggggaggatacccttgcttttattgcaacaacaggatggtctgttgctataaagactgctgatttggctggagattggttagctgtgtcaccgttaaccggtaataagggggataatgaacttattattacattggcttccaatccctctgccgaggatagagaaggtgaagtgataattcagtgtggagaagttgcggatactgttatcgtccgtcaaaatttcaattatctggcaactctttctaaagatggtgatgtaagaacttggcaagaacatacgaaagggtggggaattaatcttgtaatgatgggagacgggtttgtggaaatggatatggggagaggtggaaaatacgaggtaatgatgcaaaaggcgatggattcctatttttctgtggagccgatgcattctttacgggagtattttgatgtttatagtgtcactgttgtttcagtatccgacagcattggcggtggaacagctctaggaactacttttacaggaggcacttccataaaaggcgataatgaaaaatgtaagcaatatgctactaaagtgcctctgttgggtaattctgttagaaatacaccgatgattgtagtcatgaatagtcctcgctatgccggtaccacctatatgcattctttgggctattccatagcattctgtccttatgtggataatgatgatgaacgttttgcacagattattcatcatgaagcagtggggcatggcttcggatatttgggagatgaatatgatgatgtgtatgacggtgaaatcccgtcaaatgttatggcggaactaaaagaaattgcagaccggtatggatggtattctaacattgatttcactccggatataacgaaagtgaaatggaattattttatctctgacaaacgttatgttaatgaaagactgggagcatgggaaggagcatacggataccggtcaggtgtctggggcgtccgacgaatatcagtatcatgctctataatgtcggcggttttaatgctccttgccgggaggctatttatcgtcgtgtcatgaaactggctggtgaaagctatagtcgtgataagttccttgaatatgatgcagtaaaccggaagtctgcattaaagcgtatgaatgctggaagtgtagatcggaatcactttattcctttagcatctcctgttattatagattgattctctttctctgtatctttttgatatgtagtactgggtaactttctgtataatagctattaaagtataaatatgtatttgaggaacggttattttccgttttaaaacttgtctgccctttcgaagagaatgaaaaaaacatttattattaaaaataaatctccaattagttttgagttcaagtctaattgcgtacatttgtcccctgcattaagtatcctcatagaagtacattaatacttttccaacttattctttagtgatgatggtagaatcgtttgtctctctgtaagattcctaatagcaaaacgtacttatttttttattaaaacatttattttaaaatgaacatttttattgcagggcttaactataatatgagtgaagccgaacttggagaattatttgcagagtatggtgaagttgtttctgttaagattataatggacagagagaccggtcgttctaagggatatggttttgttgaaatggctgatgatgaagctggagataaagcgattgcagctcttaatgaagttgacatggatggaaaaactctttctgtgtcaatagcgcgtcctagagaagaacgtccgcgtcgtagttatggcaacaatggtggtggttatcgtggtggtaacaacagtcgtggtggtggctacggtggtggtcgcggagacaatggctatggaggtggcagaaacagatattaatctgtatctctataaaatataaagaaacctgctttggacatttgaaatgctgaggcaggtttttatagtgccttttcaggatataaaattaattttctcaattttttcttcagatttttatggttgtctaaaaatcttgtttccaattgtttgttatgaaatctttccattttaatatcttcgttcggatataaatcctttagtttccaaggtagagactatatccgactgtttgtttttgttctggtatttcatttcggtggtattcggatttccctatccggattatcttgttcattttttgtggatttttaaaatcgttttatcatctgggttaatgttttcttcctttaggttaaatcatttttataagtatggtttacatagttaattcttagttataatatgagttggtccttcaaaagtgtctttcaaaaggctttggctgtcggctagaaacgacttaatctttcttttgtttatggcaaacggaagatattcctttggggaataacatctctatgaatgccttttgtaatagtaaagaggataaaaacggttatttattaagcattatcaataatttccacatacattccagggacttctttttatctttataaaaaggctataagtattatgcgtgttatattcaactttattctggattatttcaacaggaaagaaaatgatttagtatagagagattgttagcttttctagaaaatagactcctgtgtttgtgttgtcaatagttctagtgccttgattcccataacggaatttcctttttgattcaatctcgggctccacactgcaactgaatatcgtagtgggtaaactgcggctataccgcctcccacaccacttttccccggaaggcctaccagataagaaaattctcctgcttcgtcatagaacccacatgtttgcatgatggcattgatacgtttcacttgagaggcggtcagtgtgattccttcgaatgtaaaagcttgtttatggttggcaaacggcaaaaaggctttggataaatcataacaactcatttctatggagcattgaaggaaatagaaatgaagtacacgttctatgtcattgtcgatgttatgatgatatttcaacaggttggtgattgccgcattcagataaccgttttcacgttcggacagggctacttcttcattataatggatctggttattcccgctgattgagtggacgaaacgaagatattcttcttcggggtatttcaaatggttcagcaggatatcagtcattacaatggctccggcgttaataaagggattccgaggaattcctttttctacctccagttgtactaatgagttgaaagctgttcccgaaggttctttacctactcttttccatagattatctccttcaagactcaaacacatggcaagtgaaaagactttcgaaatactttggatggaaaagccggtgatggcttctccatgcatgaaagttttgttttgtatcgtatggatgcacattccgaattgatctgggttgattttggcaagtgccggaatgtaatcagcctgtttgccaatagaggcgtagggctggattttttgatagatgtcttttagaatctgttgataatccatgatttggacgtttttatttttctgtatagtcaccattggctttgatgagttcgatcaacttctcaacagcctggtcttcgggaatgtttttttctatacattctttctttttatagaggctgatttttccacgaccggcacctacatagccatagtcggcatccgccatttcgccgggaccattgacaatacagcccataatgccgattttcagacctttcaaatgcgaggtggctgctttgatgcgggcaatcgtagactctaaatcatataaggtacgaccacagcccggacatgaaatgtattccgttttgctggttcggattctgccggcttgcaggatactaaatgcagtggtgtctaccgctatatgactcaaagaaccttggttgtacaagaagatgccgtcacagagtccgtcaaaaattagtgcacccatatcagctgccgctttgatttgcagatcttcagttttcgtttcctgatagtattggaagaatacgaccggattttctaaaccttcattcatcagttcgtgtgtcatggcacgatattcgccgaggcggttgggatgattgctttgggcgatgattaccacctcgggatgcagtttgagggctgcgattacttcgtcattcatagccatatagggcaggaacaggaattttagatcggaaaccgtgtgatgtaattctatcatctgctggtagttgaatgccggatagacatttttgtcttctggattccatgcattggcatccactagataggctatattgttatctcgtgaattgggtacacttccaccgcaataaatatagtcaggtttgaattgaggattggtttcgaaagacccttccagacgttcggctattactacaggaggattatcccctccaatattccggacggccttagtcttccggcggcccggagataggtagttgaattgcggagctttttttccaggaataaaaggatgtccttcccgagttagtatataatcaaccagtttgcgggctaccagaatttcattttcaggagcctcgctcaatgagacacgaatggtatctcccaagccatcggcaaggagtgcacctattcctaatgaggattttattcttccgtcctcgccatcccctgcttcggtaacacccagatgaagcgggaaagccatattttccttttccatttcctctaccagtagacggaccgtcctgaccattactacggtattggatgccttgatggaaataaccacatcgttgaaatgttccgcaacacagatacgcaggaattccatgcacgattctaccataccttcgggggtgtcgccataatgagacatgatgcggtctgacagagaaccgtggtttaccccgatgcggatggcggtgtggttttccttgcagatatttagaaaaggaacgaagcgtgcacgtatcttttctatttcttgcgcatactcttcgtcagtgtattccagtttccggaaagtacgtcccgggtctacatagtttcccggattgatgcgcaccttctccgcatattgtgccgctacatcagccactttgggattgaaatgcacatcggctaccagcggggtgtcatatccttgagagcgtaatccgatattgatatttttcaggttttcggcttcacgtacaccttgtgtggtaagacgtacatattcaccgcccacatctataatgcgtttggcttgttccacacatgcttcagtatccatagtaatggtgttggtcatactttggatgcggatggggttgtttccacccaaaggagtgcctccgatatggacttcggaagatttgcggcgggagtaattaaataaatccatgtttagtgattagtggtgagtggtgagtgattagtgagctgcgctggaatgctgcatgggtattaatcactcaccactagttaattcgttttatattcaaacttgatttctttcaattcttcattggcttttacaattttcttttttaaaccggttttgtagtctgcaaatttagcagccagttctgtatcactcaatgctagcatttgtacggccagaatggcagcattcatggctccattgattgctacggtagctacaggaattccgggaggcatttggatgatagaataaagtgcgtctacgccatcaagaactgaaccttttacgggtacaccgataacaggtagtgtggtatttgcagcaatgacaccgggaagtgcggcagccatgccggcagcggcaatgatgactttaattccacggcctgcagcatttttcgcaaattcctccacagcttcgggagtgcggtgtgccgaaagggcgttcatttcgaaaggtacgtgcatctcgtccagtaatttggcagctttttccattacgggaaggtcggaagtgctacccatgataatacttacgataggtttcattgtttttttgttattgtttggtttatatatttacttcaagcacgggttatacggatgaacgcggatagaaaaatccgtgagatccgcgtaatccgcgcctgaacaattccctaacgggaatttatattattcgttgactaatgctttatatccttcagcatccaacaaatcgttaacgtcattagtgtcattgggcttaatcttaatcagccaccctttaccatacgggtcttggtttactaattcgggattgtcggtcaatgcttcgttctgttccagaacttctcctgaaacgggaaggaacaagtccgaaatagtctttactacttcaatagtaccgaaaacttcgtctttttctaaagtttctccttcagtagtgatatctacgaatacgatgtcacctagttgctcttgtgcataatcagtgatgcctacataagctatatcaccttctactcgtatccattcgtgttctttggtatactttacattgcttggaaattccataatgttttcaatttataaggttaatactaatttttttcaaataaacaaaattccaatgacaccacaaaacaatccgacaataaatccggctaaaacttctaataaggtatgctgttttacaatgatacgggctgtgccaagcattccggatagcaaaatgaaaaaacagagccaccatacaggattgaaattgaatataaagctgtaggataataatccgcctaccatcatgccgctgcttgccacgtgtgtgctgattttccacttgaaattgatcagtgtgcaaaggatcatgcagatgagggcggctacgataatacccgacatatagcggggcagatgtatcttgtacatagtgatgagacaggtgacatagctgatgatagtcagcgcgtatggtacgaaacgtttttcgcggtgtcccaattcatgaatcccccaaccgtttattttttgaaataggtagatggcgagcattggcatcagaatggtgaaacagtagactatgcccaatactatcagtttgtactggatgggcatgatacgaagataagtgaagaaaaaaagtaggaaaaatgccacaaaaggaatcataaaaggcgtgaatatgcctgatatgatacgtgagctgacttcaagcggactattttttttggctactcttattgcttcggttgtttcgttagctttcataatattaccttcttaatcgtgcgacgggtatgttaagctgttggcggtatttggctacagtacggcgggctatgggatagcctttcgtctttagtgtttcggccagttcatcatcagtgtaaggtttttctttgtcttcggtatctacacattctttcagaatgcgcttgatttcgcggacagagagttcttcaccgtcttcggtggtgtaaccgtcgctgaaaaagaatttcaacgaatagataccatagtttgtttgtacatatttgctgttgcttacccgtgatatggtggaaatatccaatcccgcgcgttcggctacatctttcaagatcatgggcttcagcaaggattcgtctccttctaaaaagaagaggcgttgaatatctataatggcttgcatggtggtgagtaacgtgtgttgtcgctgttttacggcattgataaaaccttgtgcggcatctactttttgttttaggaacatcagtgcgtcctttgaggccttgctctgattgtctttgttgcgagtgtgttcatccagcaattcggtgaactgacggctcagacgcaactcaggaacattacgattgtttaaacttagagtaatggtgccgtcttcatacgtttctacgatgaaatcgggaataatctgctgcatatttttacccattgcttcacccagtgaactgcccggacgaggattcagcttggtgagatcgctcaccgcctcattatattgttcttcggtaatacctagtttttggataatcctttctttatttttgcgggtaaattcatcacaacatttaccgatgatgtccagttctatttgtttcaacggcgaatcggcttttctttgtatttgtaacagaagacattcctgtaaactgcgggcaccgatacctgccggatcaaagtcttggattatttctaatattttattcaattcttcttcagtggtatagatgccccgatagatggcaagttcatccatgatagactccatatttttgcgtaacaggccgtcatcgtccaatgaaccgatcaagtactcggctatatctcgttgttctggggtaagttcctgcatctgcaactggtctttcaatatttcataaaaagatacggcatccgagaaagggatttcttcggctactccttctttggaacgattatgttcctgtagtttataatcgggaatatcatcttcgttactgtaatcgcctaatgaaaaatcctcgttcgactccgtattttcgtcttcgttttctgcgtattctgtgttgtcatcttcattatcgggcatttctttcccttcctccagggccggattatccagtatttcggaatggatacgttcttccaactccacagtgggcagttccagcaatttcactaccagtatttgttgtggagataaagtctgtatttgttgctgggcttgtgtttgtacttgacgtgagccttgtgccataatatttttatttccttgtttattgcgacaaaaataggaaattgtattgtaataatcttccttttttctgggattattttaaggggatggttatctttgcctgtcatccatacaaaaaacacaagattatgtttgcaaaagaaacttatacaacccgccgtaacagcttgaaaaaaagcctgggaacaggtctcttgctatttctaggcaacgaggagagtggcatgaactatgaggataatacttatcatttccgccaggattctacttttctttattttttcggcttgccctatgctgggttggctgccattatcgatgtggatgaggataaggaaattatcttcggggatgagctgactatggatcatattgtatggatgggaatccagcctgccttgtgtgagaaagcgcagagggtgggagtgacggaaactcgtcctgccgcggatttgaagaagtatttggaaaaagctgttgctaaaagacaggtgattcattatctgcctgtttatcgtgcggagcacagattgaagctgttggactggttggatataaagcttggcatggaacagccgtctgttccgtttattcgtggagtcgtgaatatgaggaattataagactgctgaggagttggttgaaattgaacgtgcttgtaatgtgacggctgatatgcacattacagctatgaaagtgttacgtataggaatgaaggaatgggaagtggtggctacattggaagcggtggcacaggccaatggttgtggattttcgtttcctactattgccacggtatgcggacagactttgcataaccattatcatgggcatacggtgaaatcgggggatatgctgttggtggatgctggtgcggaaactgaaatgggatatgctggtgatatgtcgtctacaatttgtgcggataaaacgtttactatccgtcagaaagaagtgtatgacattcaggttgccgcacacacggcagcggttcgtgcattgaagcccggagtgccttttaaggaggtgtatgaactttcctgtagagtgatttgtgaagggctgaaaggactgggcattatgaaaggtgatcctgctgaagcggtggccgttggggcgcatgctatgttttttccgtgcggactaggacacatgatgggattggatgtgcacgatatggagaatttgggagaggtatgggtcggctatgacggacaaccgaaaagcactcagttcggctgtaagtcattaaagctggccagacctttagaaccgggatttgtgcttactatagaaccgggtatctattttattcccgaactgattgattattggaaagcggaaaaacgctttaaggactttatcaattatgataagctggagagttatcgtgactttacaggtttgcgtaatgaggaagattatttgataacggaggacggggcacgtcttttaggtaagaaggttccttttactacagaagaggtggaggctttgcgataaaattattgggggtagatagaaatatttttatctacccccgatgatatataattatccacctatggttacctttaaaccgtaatcagtcaagatttgtatgcactgctgttgtacttcttcggatggcgtttgcattttatatcctttaggattatagatactgcctagctttgtatgctttccctttcctatatcatggtaaggtaataggttaattatctcaggatgccgtggaagactggccaaaaattcggcagactgctttatgttcttttcatctgcattcactccttcaatcaatggaatgcggatataataagggaaaccggcttctgctactctgcggatgttttccaaaattaattcattgggaacatcacaaaatgtttggtgtacggtactgtccattgattttaagtcgataagtaataattcacaattccgcatcacttcatccaccgtttctttgcgggcaagtagggtggtatctaccgcccgatgaattccctgttgtccgcaacgtttcagcatatcaatcaagaatttgggatgaagcaacggttctccaccacaaaaagtgaccccaccgcccgattgatccataaatgggatttccttttctatttcatgtatcaggtattcggcggtatattccgttcctgatatctcgatagccattgccggacattcttcggcacagcgtccgcataacacgcatttttgtttgtcggtgacaataccctcgggagtcagtgtcagtgcaccgttggggcatactttcagacaagttccacagccaaggcatttcttggctgtgtatagtttgtcttttccgttacgaatgccttcgggattatggcaccatacgcacgagagcgggcatcctttcatgaaaagtgtgatgcggatgcccggtccgtcattgatagcatagcgtttgatgtcgaaaatcagattcattttgtcagaaggtttcttgtgccgtgcgggctattacgtcatattgtaaatctgcgttcatatcattgaaataatcgctatacccggctacgcgtaccaacaggtcccgatattcttcaggatgcttttgggcggcatgtaaggtggcggtatctactatattgaactgaatgtgatgtcctcctaaggcgaaatagctgcggatgaggcttgctagtttggccaggtcttcatcacgtttcagcagtgagggcaggaaacgttgattcaacagagtacctccgcttttcacctggtctagtttgcctaatgattttacgacggcggatggcccgtgggtatctgctccgtgtgagggtgaggtaccgtcactgatggcacgtccggccagacggccgttgggggtggcattcatcattttgccgaagtaaacgtgacaggtagtagacagcatgttcaaatggaagcattcgcctttggtgttcggctttccttcgatggcgtcgtaaaggtcgttaaagacctggatggcgatacggtctgcatattcgtcatcgttaccgaagaaaggtgtgcggttcagaatgaattgtcgcatggcttcctgtccttcgaagttggtgtcggtagcatggatgatttgctccatattgaatttacgttcttcgaatacatgttttttcagaacggagagactgtcggtaatagtacctaaaccggtgcattgaatataggttgtgttataacgcggtccgcagttataataatcttttcctttggcaatacagtcatcaatgaacaaagacaggaaagtggcgggagcgtatttggcgaacatacggtcaatgtagttgctgacacgtactttcatatctacaaaataatggatttgtttaaggaatgcgtcataaagttcttcataagtccggaaggtacggggatctcctgtttctaagcttactttcttgcctgacacaggatcagttccgttgtgcaaggtgacttccaatatcttggggacgttaaggtaaccggtcagtacgtaagcttcttttccgaaagcgcctacttctatgcatccgctacatccgccttcgcgagcgtcttccggtgtctttccctgtcgcattagttccatgacgtatgtgtcgggattgaatacggatgggtagccgtagcccttacggattactttgcagccttcgcgcaggaaacgctctggggtgcatacactgatgtgcagggcgcttccgggttgtaacaggtgaagatcatctactgtttcgagcatgatataggatacttcactgaccccgttgctaccatcgcgtttgatgccaccgatattcagattggtaaagtcattgtaggtaccgctttctttggcggtgatgccaactttgggtggggctgtctgattatttattttgataaaaaaacatgacattagttctttggcttctgcacgagtcagtattccttcttttaggtcattttcatagaaaggagtgagatgctggtcaaaatgtcctggattcatggcgtcccatccgttcagctctgtaatggtgccgagatggacaaaccagtacatctgtatggcctcccaataagtacgtggggcatgtgcaggaacccatcggcagatttccgctatttttttcagttcctttttgcgtttcggatcggtttctcgtccagccatcttttcggccagttcagcatggcgttcggcaaaaatgatagcggcatcacaggagatggacatggcggtcagttcttcttgtttgtcggttgcttctggatcattcatgaaatccagatttctcagctcatgggcaatacgttctttcagatccagcatgccatattgataaacttttccgtccaaggaagtatgaccgggggctcgttgttccataaattcagtgaacattcctgcttcgtaagcttctttccattctttgggaacgtgattgaagatgcgttcgcgttgggtgcgccctttccaataaggaataacctcgcgttcataggtgtctatatcttcctggctgatggtatagcgctgtaattcgcgggtgttcaacacatgaaggtcttccacgctgtgacaggtcagttcagggaaagtagatacggctttgggatgtggtccacgttcacctacaatcagttcgtctttacctatgtatatagttttccgtttacagatttcaagaaagttcagtgctcttagaatgggaattggatatttcccttcgttttctttgtaaaattcggtctctatcagagcacgttctatggacagagaaggttgtgcgttaaaagattcttgacgcaggcgttggatacggtctgtcattccgttggttgttgttatcataagagttataataaggtttatttgttcataaataggaattcccataaggacggattgaaggagccgaccgattgatatgcagaagaagatatcaatagaatgaaacgtatgccaaaagtaagatacgctgtcattcaatccatctttatggtggctaatgaatgtacagtctgctggcttttggcataccctcctgaagaagaaatgttcttagcagtagaacatcaggcagttgaacagttttctatagcctttggagtgcattcgcttatacttgtttaatagtggtcgaaattactgtttgtttcgcacataaacaaaccttatatactgtttaataacaggttaataccggaaactgcttcctcctaaaaattctctcagtaaagaggtaggaggcaattctttatcttgtaccgaagcgaaatattccaagaatttgcgtaaacgatatgcttctgaatattccggtttgttattggggacattccttagaatgggaatagcataatctttcataatggccagttcaaacaatagggcagaattgaacatggcatctgcattttcttgatatggaaagatccatttttcttctccggcacgtacgctgggccatcttctgatcgtttcttctgcggaatagccacggtatttgtggtcgcggataatacggcgcaacaaacggttgtcggtagtcggaatataattatgattgtccagcagaatagtggttaatgccgatacatatattttatatttattttcggtgggaatatgaggagttaactcggggttaagtgcatggatcccttcgagaatcaatatcatgttatcgtcaatcttaagtttgtcacctttaaattcctttcttcctgtggtgaagttgaaacgtggtaattccacttcctttccatgaagcagatcttgtaattgcttgttgaagaactctaaatctaatgcatacaatgattcgtaatcataatcacctttttcatcttttggtgtcttttctcggtcaacaaaataattgtccagggagatggggtaaggcttcagaccgtttgccatcaactgaatactgagccgtttgctgaaagtcgttttaccagaagaggatggaccggagataagaaccagttttactctttgaccgttttttcctctgtggtatatctcatcggcaatattggaaatctttttttcctgcaaggcttcggacacattaatcagatcggtggcatagccttcattacaggccacattgaaatctcctacagtccctacgcctaaaatctgattccaacgacgatgttctttgaatacttccagcattttttcttgttttaccacttcctctagtacttccggattctgacggttggggacacgcagcaacaagccgtcatagtatttcactatgtcgaatttgcggatatatccggtgctgggcagcaggctgccatagtagtagtcaatggtattttccaaagtataataataggagtaaagttctcctgaagtttcaagtagttttactttgtccatcattcctttccggcagaatagttctactactttagttgtatgacattcaaaacgatggaaagggatgttggcttccacaatctctttcattcgctgcttaatacgggaaacatcatccagtccggtctcgtgccctatctgcaagtcgcaataatatcctttggatacgggatgttcaagcatgatttttccatcagggtataggtcctccaccgctttgcacaagatgaagcaaagtgaacggacataagtgcgcattcccgaaggatttagcatattcaggaattccacatccttattattataggcccggtaattgagcccttctactttgttattgactttggcactgactggtccatatgggatatctagattaaaaccattataaatatccaaaagtgagcttccgattgggaagttctttgaaatattgttatttttgcaacagatttgtaacataatcgtaataattattactaacgtagtgaaacggcttgaaatttactgaataaaagggagattagccaattcctaccaaattaattaaagatggagtattctttttatgatttcttaaagctgctaggttcactggcgctattcctttatggaatgaaaatcatgagtgaggggctgcaaaagtttgctggtgacagactgcgtaaaatcctcacagcgatgaccaccaaccgggtaaccggagtgttaaccggtgttcttatcactgcgttaattcaatcctcttctgctactactgttatggtagtaagttttgttaatgccggactccttacgctttcacaatcaattggggtcattatgggggcgaatatcggtaccactgttactgcatggattatatctgcattggggttcaaagtagatattgctgctatggcgcttccgttattggctgttggcgtacctttattattttcaggaaagagtaaccgtaaatccattggagaatttatattcggtttctcttttttgtttatgggtctctctctcttgaagacgaatgctcctgacttaagtagaaaccccgaaatgttgtcttttgttcagaactataccgatatgggatttggttctgttatcttatttgttgtcatcggtacagttctgactatgattgtacaggcatcggcggcaacgatggctattactttaattatgtgtgccaatggttggattagttttgagttgggggctgcattggtgcttggcgagaatattggtactaccataacagccaaccttgctgcactgactgctaatacgcaggctaggagggctgcgctggctcatttggtgtttaatgtttttggggttatttgggtattatgtcttttcaagcctgtaactatgggggtttcatggtttgtagaagatataatgaaaacagcagatccggctgttgccgtatcttttaaactgtctgcttttcatactacttttaatatatgcaatgtgttgattcttatttggtttgttaagttgatagagaaaacagtctgtaaaatcattcctcagagagagcaggatgaagaatatcgtttgcgctttattacaggtggtatgctttctactgcggagctttctatattgcaggcacgcaaggaaatcaatctctttgcagagcgtactcatcgtatgtttggcatggtgcgggatctgcttcataccacgaatgacaatgactttaacaaattgttcagccgtattgagaaatatgagaatataagtgataatatggaggtggagattgctaattatctgaatcaggtatccgacgggcgtttgagttctgagagtaagttgcagattcgtgctatgcttcgtgaggtgactgaaatagagagtattggtgacagctgttataatttggcacgtacaattaatcgtaagcatcggagtgatatggatttcactccgaaacagtatgatcatattcatcagatgttccagttgacagatgatgctttgtcccaaatggtttcgttggtggaagatgaacatcatgtggtggatgtgaataaatcgtttaatatagagaatgaaataaataactatcgtaatcagctaaagaatcaaaatgtactggatgtgaataataaggagtatgattatcagatgggtgtacactatatggatatcattggagaatgtgaaaaactgggcgattatgtagttaatgtggtggaagccagtagcaatgtgaaggaaaagaaatcctaacctgaaatggctatggtgaacagaacaatgatatagatgcagaggtgcaaggtttaactcatgacggattaaatactttgtacctctgtgtcttttttaataaagtgtaataaagaagagggtataaataaaagagaatctacatgtcaatatttgtttttttgaaactgataggctcactggcacttctgatgtatgggatgaaaaccatgagtgaggccttgcaaaaactgacaggcggacatttgcgtcatattctgggggcaatgaccacgaaccgttttaccgggctgttaactggtacatttgtgacagcttctgtacagtcttctactgcgacaacggtaatgacagttagtttcgtaaatgcgggattgctgactttggggcaggctatttctgtaattatgggagctaacattggtactacggtgaccgcttggattatgtctattttcggtttccagatcgatatgaataatcttatttttcctctctttgcattggctgttcctttaatcttttctaataaaagtcagaaaaaatcttttggggaatttatttttggattttcgttcatgtttttgggattgactacgttacgtgagaatgccatgcatatggatttggagcataatgcagctatcatcagttttattacctcttgcaaggaatggggatttttttccattttatcattcttgttgataggtggaataataacaatgtgcgcacagtcttctgctgcggttatggccattacattgattctttgttccagtggtgtgcttgatttgtatttgggcattgcactggtgatgggcgagaatattggtactactgtaacttctaatattgcagctttgacggcgaatacgcaagcaaggcgggcggcgttggctcattttatttttaatatatttggggtggtatggattttatgtattttccatccgtttgtagatatggtgagtggaatgattaaccgcttatttccaggagtatcgcctgaagtggcaattacttataaactttcggctttccacacagcttttaatatctgtaatgtgttgatattgatttggtttattggatcgattgaaaaggtggtctgttgggtaatcagaccaaaagaggatgaggaggaattccgtttgcgttttatctctggtggtatgttatctactgctgaattgtctattgtccaggcaaggaaagaaattaatttgtttgctgagcgtactcgccgtatgtttggtatggtgcgtgatctattgcatactacgaatgagaatgatttcaacaaattatttagccggatagagaaatatgaaaatatcagtgataatatggagctggagatagccaattatctgaatgaagtttctgaagggcggctgagttcagaaagtaaattgaaaatacgtaccatgttgcgtgaagtgactgagttggaaagtattggtgacagctgttatcatttggcgcgtactatcaatcataaattcagagggaatgaagattttacggaaaaacaatatgaccatattcatcagatgcttcaattgacggataatgcactacaacaaatggtatctttggaagaagacgaatattatttggttgatcctaacaaatcatttaatatagagaatgagataaacaattaccgtaaccagttgaaggatcagaatgtattggatgtgaataataaggaatataattatcagatgggggttcattatatggatattatcagtgaatgcgaaaaattaggcgattatgtagttaatgttgttgaggcgcgtacagatataaaggaaaagaaaatttgatttgtaaatcgtggtagtatccatattttgtgtaaatagaaacgggattcagttataagtctcttatatctgaatcccgttttcaaaaataagcataaattggttcataatcaatccccagttagtaatcggcattgtccatttcttctcaatctccatcagagcgaggtataccattttcttcaccgcatcatccgacgggaatgaaagttttgatttagtgtactttctgatttttccattcagattttcaatgaggtttgtagtgtagattattttcctgatttccaatgggaactggaagaaaacagtcaggtcatcccagttattcctccatgagaggatggcataagggtacttccttccccatttcttttccaaattatccagttccacggcagcagcctcctgttgggcgcgttatagatgctcttcatatcggctgtaaactctttcttgtccttgtaaacgacatatttacaggagttcctgatctgatatacaacacgtatttgcgtggaagacagaggaaatacggcacgtatgatgtcggtaaacccgttcaggttgtcagtgcaggtaatcagtatgtcctgcactccgcgggccttcaaatctgtcaggacacccatccaaaatgaagaactttctgattttcccacccacatgccaaggacttctttcaagccgttctgtttcaaaccgacacagagatagacagtcttgttgatgatttttccgttgtcacgaaccttgaatacaataccatccatccaaacgatgagatagaccggatccaaagggcggttctgttattcctgagcagccctggttgactttgttcgtgatgatggaaatggctgatgtggacagttctatttcatagatttcacgcatttcctcttcaatgtcggacacgctcattcctttggcatatagggagataacaagtttttctatggaaaacccacgaccctcgtgtttgggaacaactatggactcgaattcaccgttacggtcatggagaataggtatgatcgcttcaccgtgttcagtttggattttcttggggtagctgccgttacgggaattaccgctgttatgaccggaaaccgaatttttctcataacccagatgcgcatccatctcaccttcaagcattttctccaatacctgcgcgtgtagttgtttcagaaacttgctgacatcagcttctgtcttgaactggttaaggaacttcttacttaatacctcatcaggcactgcatgattcttctctttcataatcttcttcattttgcaaagctattaaataaaaaatacggaacccaatactgaatcccgtattttacatttacacaaaatattttatagtgcctaaatcgtattaaatgaggttatttttcgatgccaactagttctacttcgaaaatcaaagtagagaaaggtttaatctgaccggcttcacgtgcaccataagctagctcttgagggatgtaaagttcccatttagatcctactggcatcattgttagcgcttcagtccatcctttgattacctgattagcacggaaagtagtcggttctttacgatcatatgaactgtcgaactgagttccatcaatcaaagtacctttatagtttacttttactttagaagaatcggtaggaatagcgccgttaccttctttaattatcttatattgtaagccgcttgatgtagttttaacaccctctttctttgcattttcagctaggaatttttcaccggcagctttattttcagcgaactgggcttcagtagcttttgctttgattgcttctgccttagactgaacgtaagcgttggcttcttccatagtaacattcatgccttttttctgcaaagcagccatgaaacctgccagaaagttttctttacttaaactttgagtagagtcatttccgaaaatacgttggctcatcatatcgaacatacgtccaccaacttgttgaccaatctgaagacctgccatataagcaacgtctttagggctagtcttgctggtaccttctttaacacctctgatgaagtcggacatataggctgtatcaacgcctagttgttggctcatatacatatccagaccttgcgtgttggtgatacccatcatgtaagaaagtgagtctacgtcattcttcatgtttgctttcggtgcttgagctgtacaagaagccaagctggctgcagcagcgattgctacaaaaaaactaatttttttcatttgccttaaatgctttaataattataatacttcgattaattctacttcaaaaatcaatgtgctgtgaggaggaatcatttctcctgcttgttgtgctccataggctagttctgaaggaatgaaaagtttccatttagcaccttcagtcatcagttggagtgcttccacccatcctttgattacttggttcacaccaaagatagccggctcgccgcgtttgatagagctgtcaaacaaagtcccatcaatcaaggtaccttcataatggcattttacacggtcggttgcactcggtttttttccgttaccttctgtaatcacttcgtactgtaagccactgggaagtgtcacgactcccggtctttttgcgttctcctccaaaaatgattttcccttttcaatattctctgcattcaatttggtttccagctcttcaaagtacttgtttacgatttcacgtgcttcgttgtggctgatagccgtttcttttctatctaatacgtctttgattgcttgagcaaagtcttcaacattaatactttgagcacccatgctcaataaattctggccaataccaaggccgatggcgtaactgaatttatccataactatttattttataagatgttttatacaaaacgcacaaaggtaggtgttttatttgaatgaatctgtttttaacaatttaatttttcttatttttgtgtgtttagttaaaagaggaggactagaaatgaagaatttagtagttttaacaggtgctggaatgagtgctgaaagcggtatcagtacatttcgtgatgcaggtggtttatgggatcagtatccggtggagcaagtggctactccagaagggtatgcggcaaaccctaaattggtgattgatttttataatgagcgtcgtaaacagttgtttgctgtaaagcctaaccaggggcatgaactggtctctgagatggaaaaattctttaatgtgactgtaattactcaaaatattgataatttgcatgagcgtgctggaagttcgcatattattcatttacatggcgaactgaccaaagtgacatctagttgggaacctaataatccagcttatattaaagaattaaagccggaagaatatgagatacatttgggagacttggccggagacggttctcagtttcgtccattcattgtatggtttggtgaatctgttcctatgattgaaactgcaattgaatatgctgaaacagctgatatctttttaattataggaacttcgcttaatgtatatcccgctgccggtttgttgaattatgtgcctgccaacactcctgtttatttaatagatcctaagcaggtgcccattgcatcggggcgtaaagtgcatgtaattcagaaaggtgcgtccgaaggaatggaagagttaaaaaaaatattagtgagatagtttgcaagtaaacaatttcattgtatatttgttatgtatttaaagaacatttaaaacataaaacagagacaattatgaaaaagtacgtttgcacagtatgtggttgggtttatgacccggcagaaggagatcctgaaggtggaatagctccgggaacagcatttgaagatattccagatgattgggtttgccctctttgcggagtaggtaaagatgatttcgaagttcaagaagattgatcccatcttataaccggatatcatataaagcggaggagtttcttctgtatgatatatcagatagcgcgattaattatttagttgcgctatttattttacattattataaatggttaatcttttaaaaaaagagcgtaacctataacaggttgcgctctttatggtataaataaagaatgttcttatttcttttcttgtttttcaggacgaggcagtaatactttgtgagagagtttaaatttacctgttttggggtcaatatcaagtaatttcacttctatttcgtccccttcttttaaaccggcctcttctattgtttcaagacgtttccagtcaatttcagagatatgcaacaatccgtcttttccaggcaagaattctacgaacacaccatatggcattactgaacggactttacctacatagacttcaccgacttcgggaacagcaacgatacccttgataatgcgcatagcatcgtcaatacatttcttgtttgttcccgcaatttcaatacggcctaccccatcagtttcttcaatcgtgatggttgctccagtctcttcctgcataccttggataatctttccgcccggaccgatgatagccccaatgaactctttaggaatagtcatcgtttcaatacgaggagcatgcggtttcaaatctttacgaggctcggcgatacattcggttaacttgttaagaatatgttcgcggccttcttttgcttgcagtaacgctttttccaagatttcgaatgacaggccatctaccttgatgtccatctgtgtagcagtgataccatcacgagtacctgtaaccttaaagtccatatcacccaagtgatcctcatcgccaagaatatcagataatacggcatatttttcttcacctgcattcttaatcaagcccatggcaatacctgaaactggttttttcatggcaacaccggcatccattaatgcaagggttcctgcacagacagtagccattgaagaagaaccatttgattccatgatatcagatactacacgtactgtgtacgggtatcctgtaggaatttgtccttttaaagcacgccatgccaagtgcccgtgcccgatttcacgacgacctacaccacgttgtgcttttgcttcaccagtagaataaggagggaagttgtagtgtaacaaaaatcgttctctgtgttgatccagaacatcgtctacaattttctcatctagtttggtacctaatgtgacagaagttaaagactgagtttcaccacgggtgaagatggcagaaccatgaggaccgggcagataacctacttcgcaccagatagggcgaatttcagtcgtcttacgtccgtccagacgcttgccttcatcaagaatacaacgacgcatagcttccttttccacatcgtggtagtaacggtcaattaatgtacctttttcttccagttcttcttctgtatattgagttttgaattcatcgcggatggcgtcaaaagcatcctgacgttcatgcttgtttctgtttcctgaagcagcgatggcgtatgctttatcgtaacaagtttcgcgtacagctttgcgcaaatcttcatcgttttcttcgtggcaatattcacgttttactgtagaaccgacctcttccatcagctccatctgcgctttgcaatgaactttgattgcttcgtgagcagccttcatagcagccagtaagtcttgttcgctgacttcctgcatttcgccttctaccatcatgatgttgtcatatgtggcagcaaccatcagatccatatcagctttcccaagttgttcgaaagtggggttgataacgaactgaccatcgatacgtgctacacgtacttcagaaatcggtccgccgaaaggaatgtcggaaacggctaatgctgctgaagcggccaatcctgccaatgcatcaggcatatctattccatcagctgagaaaagaacaatgtttacgtaaacctctgcatggaaattatcgggaaataaaggacgcaatgcgcggtctaccagtcggcaagtcaggatttcataatccgaagctttgccttctcttttggtaaagccaccgggaaaacgtccgaatgctgaatatttttctttgtactctacctggaggggcataaaatctgtaccgggaactgcatcttttgctgcacaaacagtagctagcaacatggtgttacccatgcggagcattacagaaccgtctgcctgttttgccagctttcccgtttcgagtgtgatggttctaccatcaggaagctcgatcgtcttaacaataggattgatcataaaaaatgttttaatatatttttcgtctaaaattcgtgcaaagataggcatttattcttctaatttggtgagaatgagataaaaagttactatgattactgttttttttcattttaatgtgtaagaaggtggataaatgctttgacaaaccacgaaaagacgtatctttgcattcaaaattattaagagaacacacatttatattaattttagcgatgaaaaagaatgtatattttttgctcgcacttctgttgatagggttgagcgcctgcgacaatgaaccgaagttcaaagttcaaggtgaaattaatggtgctgaagataagatgctttatttggaagcgtcgggattggatggcatagtagcgcttgattcgacaaaattgggcagtagcggaagttttagttttgcgcagaagcgtccggaatctcctgaattctatcgtttgcgtttggataataaagtgataaactttgctgtagactctacggaaactgtatcagttaaggctgagataaatgattttgcgactgcctatcgtattgaaggttcggaaaacaatttgaaaattaaggaattggtgttgctacaagctgatttgcagaagaatgtggacaaactcggccagaatcgtaatatccctgcgggtatcgcacaagacagtcttttggctatggtaaacaattacaagaataaagtgaaacgagaatatatctttgcggctccaaatatgccatacgcttatttcgctttattccagtcgttgaatgggtatatgatttttgatcctttgacaaataaggaggatgtgaagtgtttcgctgcggtggctacgagtctgaataatgcttatccacatgcagaccgttcacgtaacctgtataatatggttataaaaggaatgaagaatacccgtactccccgtcagcaaaccatggaaatccctgaagataaaatcaaagaagctagcattattgatattcagctgaaggatttgaaaggcaatacacgcagtctgaccgatttgaagggtaaagtggtgctgatcgattttactgtatataacaatgcaatgtctgctgcgcataatttggcgttacgtgaactttataataagtatgcttctcaagggttcgagatttaccagatttcactggatggtgatgaacacttttggaaaacatctgcagataatctgccttgggtctgtgtacgtgatgctaatggtgtttattcttcatacatttcattatataacgtaactaatctgccttcgatatttttggtaaatcgtaataatgaattgagtgctcgtggtgagaatattaaagatttggatgaagccattaaaaaactcttgtaaaaagctaattatgagttgaatttgtttaaacatgttacatagcatccttataaacttgactcgtattagataaaagtctatctttgcagtacttgaaataccaaagagggttccgacatttccatgtcggaattctttttgtttttataggtataactggaacaataaataattatataatttaaaaggaggaaaacattatggcttatatgtcagaagaaggttacaagcaactgattgaggaactgaaatatctggaatcagtagaacgtcccaaaattgtgtcggctattgccgaagcgcgtgataagggggacttgtcagaaaatgccgaatatgatgctgccaaagaggcgcaaggtctgttggagatgaagatcagccagctgaaatcaactattggtgatgctaaaattattgatacttcaaaaatgaacgcagatacagtgcaaattttgacgaaagtagaattgaagaatgtcaagactggaatgaagatggtttatactatcgtagccgaaagcgaggcgaatttaaaattgggcaagatttcggtaaatactccgatagcacagggtttgttaggaaaaaaagtgggtgatgtggctgaaatcactattccgcagggtaaaatcagcttagaagttgtgaatatttcattttaatattataaggcaggtccgctatgcggggctgccttatttaatacttatagatatggcaacaatatttagtagaattattacaggtgagattcctagctacaaagtggctgaaaatgatcagttctatgcttttttggatatcaatccgttaaccaaagggcatacgttggttgttccgaaatgtgaggtggactatatctttgatttggaggacaatgaactggctgctatgcatgtttttgcaaagagcgtggcacttgccattcaaaaagtttttccgtgtaagaaagtaggtgaggcggtaatcggattagaggtccctcatgcacatattcatctgattcctattcagaaagagtcggatatgattttttctaatccgaagttgaaactgacaaatgaagaatttgtggaggtggcgacagcaatcaatcaagcctgggaaggtggtgacaagtaatctttttctttcttagtaaatataaagagcgggaaacggatattctgtttcccgctttcctttatgattaaactccggtcacctgtctttatacaaactgatctcctagcttgatttgtacgtcattcacgaattttcggatagcgctttcgtcatcttttttgcaaatgagtaatacattgtctcttgcggctactaaataaccttctagatcctgtattacggctaatttcccttctggcactactattacattattatagctgttatataataaggagtttccgtttactacaacgttaccttcttggtccttggatgatatatcatacagggagccccatgtacctaaatctgcccatccgaagtcgcacaattggacgaaaacattgttggccttctccatgattccatagtcaatggagatattgggacaggaagcgaaatcttcttctccgttagtcagtttggtacaaacttcgggcataatctcattgaaggcttctaaaattgtattgatattccataagaagatccctgagttccaatagaattctccactttctacgaatactttggcaaattccagttggggcttttcaatgaatgtttttactttaaagaagtctccttgtttttcttcctcaatctgaatatagccataaccggtttccggtctgttaggtttgatgcctaatgttagtaattgaggagagtttgaaacaaattccagtcctttcaaaattgcagctttaaattcatcttcttttaaaatcagatggtcggacggtgcgacaatgacattggcatttggattgaatttttttatgtgataggaagcccaagctatacatggagcagtgcttctgcgagtgggttccaataaaatttgtgatttgtccaattctgggagttgttcttggaccagttctttatacagcacgttggttgtaataaagatgttttctatagggactatttttttataacgatcaaacgtttgttgtattagagaacgtccagtcccgaagaaatcaaggaattgtttaggaaggtttttgcggctatatggccaaaaccgactacctatacctccccccatgatgacacaataattattgctgtttgtcatgatataaaatcgttttaaagtttccgctaatatagggcttatttttagaaaaccattgtccgttatcccataaatcgtagtatatttatctttttttgaaaaaaagtgccgaaaagtttgcagatatgaaaaaaagcagtacctttgcaaccgcaattgagaaacaaataaggttttaaaagatgcccagatggcggaatcggtagacgcgctggtctcaaacaccagtggattcacttccatcccggttcgaccccgggtctgggtactgaggcggagaaagttgaaaaactctctccgcttttcttttctactccccgtaactcgttggtttgctgatagattaagtcaagcactttgttataagaattggttcgatatgtttttccgtcaaattcgattttttcgggaaacatcgaacttatcagtttaattttcacccctacagacgcatttcttatatagctatctatattgtttatcagattgatagagtagtttagttttggttcgatattactacggttagggttctcacgcatttcaatctgttgttgcatggctgaggcttcttttgtatatctctccaacattctgttatattcttctttggttaaatctccgtccaggtatttatcttcaatgctgttgatacgtttttgaatggtagaaagttcattttgcagtgctgctacttcttttttactttctcctttgcgttcactttgcaaatcctttagaatttcgttatacaagtccaataccgttttattaggctttaattgggctgtgtatcgagcgaactcttcgtttacgttttctgctctcatccttatatgtttttgattgttacaacaaaagtagtaggtgtattttccgccattgcccgaacttgtcgcaccagttaaggcacaaccacatacggggcagattaaaaacttccgcaaatacaaatcgggatttatggctttggatagtttgggtgttttctttcttttaccgtccaaaatctcttgaactttatagaatgtttcttcgtctataattgcttcatgttcaccgtttacataatattcgggttctcctttgtatgctggcacacgtattttgccaatgtagaatttattacgcaacatttcaagaaatgaactttcgggtatattatatccttttcttgcaaatttcctacggatatagcaaggtgtttcaatacctttagccacttctttaaacatggcttgtataaatggtgctgtattggtatctatttctacatgggtttcatgtttgctaatacgtacattctgatatcctcttggtgctttattagcgcatttcccttttgccaatgttccatgaataccgtccattgtggcttttgacctcttgatgttgtcgcattgtgccgagcctatgtgtactcccaataaaaggggccaagtgtcagaattgaagtctaaaggtgcttcgattgcatttggttcaactcccaatttaagtaattcttttaggttctcactggcactgataatgtctcgtgaatatctatcccaccgcaagaatagtaatttgtttactctacctttgtttttacgtatataattcattattccttgtatgacaggacgtttttcaaatgttttagcactttcatcctctctgtatgggatattgttaatgatgttatatcccatttggttacaatatttccgtaggcgttcttcttgtacgtctaagctggctcctaatgtttgttcatccgaacttactctacaatatattatcacatttgcattcataattcttgttttttagttaatgctattttttcattctctatctgcaattctgctaataggtatagatattgtctcactatttttacttgttcattatcgtatttctttttacctttattgagtattgttgcgcattgttccagtggtatcattagatactggtattattgtgttgcaatgtgtgatgcaacttattcttacacattcaatcaatccacaaggcaagtaagtgcttaggcatgaatgtgcttcttgtcccatatatcattatttgaagtaaaatatgttttctttaagtgaattgatgtactaacattgcaaatatacgacctatagatgcaattaccacttttgatatgtaaattatgttaatttggctaatttccgcagggtgttaatacttgttcccgtcagttttgaggtatttcggagtgaataccctcttttcagtagtcttaattcctctgcatactcttccctcatagcctcatcacttttcgtatatccgattcttcgtcctaccttaccgccattgttacggaagttctggtaaccacttgcaacacgttctctaatagtcttgcgttccattcgtgctacttcggcaagtatagtgataagaaactggctcatagggttgatttctccctctggagtaagcgtttcaatattatagttttggatgaatactgatactttattctgatttaagatttctatggcttgtaatacttgtagggtatcacgtccaagtctggatagttcggttactattactttgtctatattgtgggaattgatgtagtcaatcatattcatcagctctgtacgttctgtattcttttttgctccagatactttctccgcaaatatagcctcaaccgtccagttgtttgctgaggctaatacctgcaaatcatttatttgacgctcatagtcctgtgttccgttcgtacttgatactcgtgcaaagattactacttttttcatggtgttacttgtttatgatgcaaagatagtgatgtatatttaatataaatcatttgcagcgttaaataaggctagaaatatggtaaatattaaatatttgtcattcctttgtcagataaaaaatagataaaatgaaaaataagcaagaaaggacggttattcatgtagaaatatctggacttcatttctactttggctctttaactgccgtttataccaaattcactccagagcaacttggtgtagcattggggacattacggaattaccgagtaacaagtgataaaccgtatcaaaacagtaaatgtattatccgaaaagggattttggtaacagtacaaaaatctgttatctaaatatcatcgtttgataggaattgagtatctttgcaatggtaatcataaaaagataagcctatggcataaaacagataaaagacatatagaatagaaagcgttagcttttacacttgcttttcaaaatcgccaattttaaaagtatccaagctgtaaagttgatgcctacgttgtattctacagcgtgggctttacttgtttggatacatggtgtttggcgataccagaaaagcagacaaagtttagtccacgctttttatttgtctatactacagcaatttggacagcaaagaaagtttctaacagaaaaacaaatttgaatgattacagtttcatataaagattttatttctaatagtggaaatatccaactagataaaatagaggacaagttacgtaatctttttttggtggatagtaagataaagttgaaagaagtagataaaatctataccattgataatataagtgattttatccgagatatatctttgttcttaaaagacgaacaaaaatgcagcgaggaaaacaatcaagatattaaacaatccatgcaaatagaacaatctatagcggtggaacaagaggatgactccgagtataatgtttatagaacatggtggggaaaaacatttgcaatatttgttgtggtatggcttatatctatgttcacttcccatgattggggaactaaagacttctctagaaagtattctttgagatatagtgtttcatattcagaagttgaaagagtagttggatatgatataccaatgtttcctattccgtacaaaagatataaaatagaatataatgacgggagtgagaaaacaatcggatataaagttttagggttaatttttataacggatgagatatgagtgcaataaatggaaaaataatagaacggatagtaaatattcctgctaatactgcctttgaatcattttctaaatttcttaaattgaaaaaatattctatcggagaatcaaacacaacaactgggcaccttgtttttaaaacgagtttgggtgggcttagatacatactctataatggcaactatatcttttcttgcgacataatatcatttgatgaaaatagaacaagaataaagttacaaggtgtatttagttgtgatgcagaaataaatttgtttgagtctcttttcaattcatctgcaaaattgggagagaaaataattaaagaatttgccaactattgtgaaaagagataggtatatgaaaaggattatttggacgttatgtttatgcagtttttttatttatggctgtgataataagaagaaaatctcaatttcaactccagaaaaggatgctaaagaaatgtctgtatatcacaaacaagttctgaaaggagaaatgactataactgaatttgaaaatatccttaactctaaggttaatatgtatataaaggatggaagagatagggatgaggttgcactctttttagacttatcaaaagagattatgcgtaatactgatttagaataatcttttagattaaactgacatgaaaagaagtgtatcaataggtcttttgatagattatattgatacactttttgttttgatacacaagcctcatcaaagtaacagattacgtatcttttcaatagggttttcactggttgaggctgatgtcattgcatgataaaccgtttcaaactttttcattcgtttgcttgcaccactacgtgagttgaacttgcttctaatatcttgctccagtagttttaaatcaccattgtacctttcgagaatgattttcattgcccaattttcgtaatcatcaaatgttgtgtttggcatattggctgtagaattaccgaaaaccttgtcaaattgagtaaggatagggtttgtatcggaatttaatacactgaatattttggtatcggtcaaattcaaatagttcattatctttttaactgtgtttaatgtgatttcaaatctggttttccctttgaaatagtctattactgattgtggttgtgataggctattcaaaaagtctttattgtggctggtacatatttctttttccttattgtataaggtgattgtttccgtacagtctttggatttcacatctttagtaaaagtgatgccctctttatcgtaatgtgcccacttgaagcgtctatagttgtttacttgcgaattaagaacgttcagaagattatcacttagaataaggtttgcgtcataagttacatctactgatgtaattgccccattggataagatactatctacgtcaatctcacaaatatttagttggtttatattggttagacattctttaattgtatcttttgaaattaagtctggatatttttctttcaaaatcttactggaaaattcaagagttaaggtttgttttacataactgacagctatataaaggttataagatatatttatatcatctttagaactgtaaaatatacctattctttctccactacgtgaatgaaacatttcattaaacttcacttttgtagcaagaagatatttatagttggatttaattttaattctatcaaaagtgattaatcgtttcttttcatattgcgatttcattaaaaaattaaagttattcttttattcttgtgggaaatgtactctgtaggctacaatttccccctttgataatggagtatatcaaaggactatgaaaagagaggggattactgcctctctttttctgttttattacttgggttgtcatctggtttgactggtatagtcttccaataattagtcataccttgtgatattgcttggatatgcgaagctgacttacttctacctcttaatgattgactgatttttgctttggtatcgtctccaagattgcgatacattctctttcctatattatccatattaattgattttatactagataaatagtcaaatgaagtaagaatgtaaagaatagtaggctgatttcacagaaaaaaatatctggaccagaaaattttattcacagaaccgtttgttttaatcaatcatacctactaaaaaggggtattctgagagccgagttacgatgttatcttctatttattaactagataagaagtaaatacaaactcattttgaatctaatatattatttactgtacttgcctattttcattaaatattctacctttgtcggtgcagaaaggagaattgaagtaatgtaaatccaatattgaggcttggtttttataacggtatgaactcccgtagttcccaaattaactccaaatcatgtaggaattggttcgagaacagaacggttaagggtacgaataaactctgataatcacctgattatcagagttttctgcttttatggggcgtactaaatgtgtactgaatgacgaatacaaagaaaaggtgtacttttataatttttctccctgtatctttataatttcttaactattaccttatcttttcttccttattattgccgatgttttcgggaaaagtgagattcttaccttatatttgtaacagtgaacgtttaaaggcacacgattatggaaaatcatatagaaaccaatttcagagaaatacagaagatattagatagttgtatagcgcatgactataaaactaaagtagatgcactatttttaaaacgtgaatatttgacgcaagcccagctaaaggattatttgcggcaagaaattttccgtgtgactgaaaatattgtagccatccaacaaaaataccgtgtcgtgcgtaacattgtattggatatggatattcccgattttttgtgggaaagtggttattttgaggacttgaattctgatgaaagaaaaaaatatatcggtttccgctgctctgattttgatatggatgcatatttgcatgaaccgtcctgttatgatgggcggcttccttatttgtccattatcgttaatcttgtcgtgctttccaaatatttgcgctatctgcaagaacaggaaagcaattaccatacagatgcggttgccatccaagagcaagccttgccaaaagagaaagaggaaagtgcagatactaatccaaccaagattgtgggcaaaagcaatcctttcaagtccacgttgaaagctaatgaaatcaaacttctgaccgactgtgtgaatgaagcgaatatgtttactactaccgtcagtgtcaaaatacttaccgattttttcaactgcaaactgaatggggtattgaaagttaataatacccgtctgttagcctatcttatgatgcaacttagctgttataattacatcgtttatgaatggcagtctgtcatagcaaacaataagctgatattgaagaagataaaaggtgaaccgcttacacgtactgacctgtcgagtgcgacagaccaagcaaaaaacatctatccgaaaggatatgaaatcatagacaagtacatcaaacaactgaaaaaaggttgagcatagattgaacgctcaaacaaaggtcaattagagttcattttcaggctcttaactttgcccccgttaacaaaaaaacgagggtgcgcaccttcatattgtttcacctaaattcctaaacaatatggaaagagatttagagttaagagtttccgaactcgaaaagatgttgttcctttcaaagaatgtgcttagcttcgatgaagcgagcaagttcttgaacctttctaaaagttacctgtacaagctgacttcgggtaacttgataccccattacaagccgcagggcaaaatgctttattttgagaaagcggagttggaagcatggttacgtcagaacccggtcaagacgcaggcgcagatagagcaggaagcgcagaagtatatccttaaccgtcctctaaagaaataacggctatggaaaatagaaaagcgatagaagccgggcaggacatcaccatgcagaaagaggatttcgcagccctttggaaaaccattcatctaaaggtgacggacacttacgaagtaccgcccgaaatactttgggtgaacggctctaccattggcacgctgggtaatttcagcgcatccacgggtaaagccaagagcaaaaagacattcaacatttccgctatcgttgcggcagcgttgaagaatgacgaggtactgaagtattcggcatacctgccaccgaacaaacggaaaatcctctatgtagataccgagcagagcaaataccattgccacaaggtcatggagcgtattttgcggcttgccggactgcctaccgacaaggacagggacgattttgttttcatcgtgctaagggagcagacacccgataagcggaaacagattatcggttatatgcttgaaaatatgcccgatgtggggttgctcatcattgacggaatccgtgacttgatgtatgacatcaacagccccagcgaatcgactgacctaatcaacctcttgatgcgctggtcaagcggatataacctgcatatccataccgtactgcatttgaacaagggggatgacaacacaagggggcatatcggtacggaactgaacaacaaggctgaaaccgtcctgcaaatcacgaaaagccagcaggacggcaacataagcgaggtaaaggcgatgcacatacgtgaccgggaatttgacccgttcgcattccgtatcaatgacaacgctttacccgaaatcgtggatgattatgtattccaacaacctaagcaggacaggaattttccgcttacggaactgactgaacagcaacaccgggaagcgttggagaacggtttcggcaagcaggtggtacaaggctattccaatgtcatagcggcattgaaacagggttatgcgagtatcggctacgagcgtggacgcaatgttcttgtgtcacttaacaagtttcttgtgaacaagcgcatgattgtgaaagagggcaagggctaccgctataatcccgatttccattattaaaagtcagtttggtttagtccgggtgtatatacaagaggaacggacttactatttccctgtatcggaacaggcaggtttagtatggtacgggtatatatataacggactaaacaggactggtgcacttttcaactattttttagtccccaaaaaagaaaatgttatgaatatcgaagatgtgaaacaaatacccatcgcagactatctgcacagtttaggctactctcctgtcaagcagcagggcaacggcttatggtacaaatcaccgttaagggaggaacacgaaccgtctttcaaggtgaacactgaccgcaacctttggtatgactttggcgcaggcaagggcggcaacatcatcgcactggcaaaggaactctattactccgacagcctgccatacctgttaaaccggatagcggaacagacaccgcacgtccgcccggtcagtttttcttttccccagcgtaggacagaaccgagtttccaacatttggaagtccgtgacttgacccatccggcattgctccgttacttgcagggacggggtatcaatatcgaactggcaaaaagagaatgtaaggaactccattttaccaataacggcagaccgttctttgctatcggtttcccgaacatagcaggaggttacgaggttcgcaattcctttttcaaaggctgcatcgccccgaaagacatcacccatatacggcagcagggagagccgagagagaagtgtttggtattcgagggttttatggactatctttctttcctcacgctccggatgaagaactgcccgaccatgcctgaccttgacaggcaggattatgttatactcaactctactgtcaatgtgccgaaagctattgacgtgctgtacccgtatgaacgcatccactgtatgcttgacaatgacaaggcaggatatgaagcgacacgggctatcgaattggaatactcctaccgtgtgcgtgacttctcgggcaattacagggggtattcggacttgaacgattacctgtgcggcaggaagcaggaacagaagaacagcaccagccaagcgcaggagataaagcaggaaaccggacaacgtgccgccccaagacagaaaaggggcaggggcatttagtccggcaggattaccagcgacaggcggtttaatttggagagcaaggttatgtttcggtaaaccgaaactaccttgctttgcttgacagcaaagaaaatttctcccgttggtcgcaatttttaagacaccatttaaatgtaaaaacctatgacgaatataaaggataagccggggggacgtccggcaaagaaacggatagagaagcaacaacgggtagtcagcacgaagctgaccgagttgcagtattacgccatcaggaagcgagccggggaagccgggttgcgtgtcagtgagtatgtacggcaggcggttgtttcggcagaggtcataccccggctgaacaggcaggatgcggacaccattcgcaaactggcaggggaagccaacaacatcaatcagttggcgcaccgggcgaatgccggaggtttcgcactggtgtcggtggaactggtgaaactcaaaaacaggattgtcgaaattataaaccagttgtcggatgattggaaaaataaaaaagggaagcgggtttaagggctgcgtgaactatgtgcttggcaaggaacaggcggttttgctccatgcggacggggtactgacagaaagccggggagatataatccgcagcttctgtatgcaaaccgggatgaatcccgacttgaaaaagccagtcggacatattgcactaagctattcggcagtggatgcacccaaattgacagacgagaagatgatacagcttgcgcaggagtacatgcgtgaaatgagaatcaccgatacgcagtatatcatcgtgcgccatcaagaccgggaacacccacatgtgcatatcgtgttcaaccgtattgacaacaacggcaagaccatttcggacaggaacgatatgtaccgcaacgagcaggtatgcaagaagctgaaagccaaacacgggctttattttgctggtgggaaagaacaggtaaagcagcaccgcttgaaagagccggacaaatcgaaatacgagatttacaacgctgtaaagaatgaaatcggcaaatcccgaaattggcagcagttacaggggcggttagcggaaaagggtattactatccggttcaagtacaaagggcagacaaacgaagtgcagggcatatccttttccaaaggtgaatacacgttcaagggttcggagatagaccgcagtttcagtttctccaaactggataaatgtttcggggatgcaggactaaatactgccggaaactaccgacagacagtttccgtacctgttcaggagccagcgcagacaccgggcaaagccgacaatccgttactggcaggcttgggcggtctgttctccgcttcatcctctccggctgatgaaatgcccgatgattcctttttgagaaagaagaagaagaaaaaaaagaaaaaacaactaaagttataagcgtatggaggaaaatttgattttagaggggcttctctcaatggttacagaactgaaagagaagcaggaagcacaggtaacgccagccagtcgggaggaaactcttgaaaggctgaacgctatcgaacaggcattgtcggaactgcacagcaacccggctgctcccgaaaaggatttgcaggctatccgaagccagcttgacgagataaggaacaggatgcagggtcagcagaaacatatcgaggacaccaagaaaatagtattggaaacctatcgttgtttcaaggttatgattgacgctttgggctcttgcaaaacggataaagaggaagctgcgcccttaccgctctatcaacggatttacaacaaggtcgcttcttggattcgtccgggattgttccttttctcggcagtgctggttgtctgttccgcttccctgtttttgaatgtccgtttggctgaacgtatgcagcagttgcaggacaacgatataaaataccgctatttgctgatgcaaggacaggcagacggggaaacttttgatatgctggaaaacaagttcaagtggcaacgggataacagttttatccgaagtctgaccgattcagtgatggattttgaatactgcatccaaaagcaggcggaagcactggagcgtgcaagactgttgaacgagcaagccgaacagctaaagaaagaagccgataagttgggcaagccataagcaaggaaagccggaacaaatgatgaagcacattcaccgttccggctttttagatttacttctttttcttcgtatagtgttctttctcgaactggcgtagcgtggtaatactgaacctttctttgatgaactcccttacatcggaagccttgtaatacacttttccgctgatagtgaagtacggcagcgcaccgatagcccggtagcgttgcagggttttgatactaactttgaacaacaggcataagtcctgattatccagcaagttatcatcttcgggcagtaccctgtctgcattgcgtagtacccgtacatccttacaaagttcttccagtttggcgtacagcttctgcatccattcaccaaattcgtcattctctatatacataattgcttcatgtttcaggttatacattcttatttgtcaatcgattgatgaagcaaagttctaaaaatggatgcaaagaaattacaggggaactaatggaatcccctataaataaaccataagttgctgattatctatatcctttcttgtcatgttcctttttgattaggtctgccagtccattaagaaattcggtgagtttgcccggttttcgttttatcacgtcctcatgcttttggtgacagtcgcttatcttgatgttaaacaaccactcaaaacctttggataaatccaccaaataggcaggctttccattctgataaacgatgtctttggagaggaacagaccgcttaccatttccatgatgttgataagggttgtcttgtcagcgagaaatagaggggaaagagattgcttattagtacgttgttgtagctgttccgggtacttgatacgccattcgataaggcgtatttcagtgtttaaaagtcctatcgcttcatcaactaaatgcaaatagggtatttttttcttgctcaaaccgtacacgatacgatttaagacgatacaagccaaaagaaaaataacgtagtaatacgccataattttgttcgttgatacagaaattggctacatgaatagccaattcttcaatagcttcttccaattcggatgcagaaactttacgctgtgagtattccgataataatcggaaaagtctctgttgtaatatgtgcttattgttcattgtatatatatttctaatttaagaactgtctatctaaaagaatattattttcagaaagagataaaacttaatcttcaactttttcattataatactttagaaaattaatttcacctatatcttttaaaagtttttgattttcaataaagtcctgtccatattttagccaacttttggtgaatcttctaagtttggcacatggaaaatcagaacattgaaaacaatgtgttatttcttttcccaagcagcacaaatgaaatgttttacatttttcgcatcgagagttactcagttctgctcctttgcaggggcttttttctcttgtatatgcagggcaaccaccacaaaatacaccacaagcaggaatacgaccgttataagatttcatttgctgagtttctttgccatccaaaaattggtgagagaaagcatatttgctttccgtttttgttcttcctctactatatagcctcttttttcaaagaatgagcgggctgttaaacttacttctgatgtaatccgtataagtcctgttgcagttgcataccgttctatttcatttagaagtatcgtagcaatacctttaccttgaaaatctttatgaacaaacatagaatgcaaatagccttgtagagtaatggatgcaaagccgacaatttgtgactgttgattagtggctacaataaaataatgtgttttaatcattccttttatatgggaaaggtcgtttccacacgatgcccaatcttccacttctgcttttgaataatcacgcttgtttatattgaggactgtatcttgaaataaatctttgatttcaagggcatcagacggttgggcaattctaattgtaaaatctttatccatgtattgtaaaattagtcatttgtttatatgccttttatcataggaatactttttttgtagttccctaaagatacgttccaaatcatatccatgcggattggaaatttggaaacatccgctttctatggggctattaacctgaggggcagttatcaccgtgtccttgaaaacgaaagcaatgtactttcctacactctttgttgtggcttctctccatataggcaatttatcttggaggaagacaccggtaatgaccgagcgtccaaaagcatcagtttccaaacgtaaagtatcgaaatccttaacagtaaggaaaggtgtttgtgaaaggctgtctgtagtctgtgatgttacgtagtaccagccgtttatccggtgaaaggattttgtctgtatacaagctgtcattagtaggcagaaaaagagaattgttgaaatcttcatatccgctatttttaggttaatacatcttctccaacgtccacaccatcttattgggattataggcttccattacgaggtgtgttcctgtgtattccagcactgtccacggacctgctatgttgtcgaacgtgatgatttttccatttacttgataagtaaaatctgtgttccacatatatccgtcttcttcgttcgtccttgtataaatgccttctgattcgttggtgaactgaagaatggattgttttgtatagtctatctcatcttcgatattgtacacggtcatttgcgcttgccaagtagtttgcttcaaggcttcgggggtgaagacagaagttggggcatcgtcgttactacaatttgtcagacataacatggcgcaaataatgaatgtggaaagcaccatacataaagtaattttctttttcatcttatctctattttaagtgattgacaataattatatatttctctccatagggacactaacaatacctttattaatttctttttcacccacttttttgaagcctaaagatgtataaaaagtttctgcataggttgaagaattaactgttatataagtaaaattacaattgctcatcatatagtcaaataacgattttcctattccttgccgatgatagtgtgacaagacaaagaagagggatatatgttgtctttcccgatgtacaccgattattcctatcaataaatgattgtcaaaggcaccatatatgtcaagcgtattcatcaacgatgtgtcatacacgaaactttcaaaggtttcaataccttcttgagtgaaatcattcctgccacattccatacatacctgataggacaaatcggcagcattgttatattctccttgtgttaatttgcgtatcataatattcatatcctaaaatcagctcttagcaattcataataatggcaatctaaaaattttccatttttgaaataggcattacaatgtatgccacatttacgaaagcctattttctctaatactctcattgatgatatattaccagcataaacatttgcataaatacgtatcacatctgtatgggaaaaatagctactaatagcaagtactaatatttgagtcataatccctttaccccaataaggttcggcaagccaataccctaattcagcattgtagcgttccacgtcaatgccacgagcgaaacttatattacctgctgcttcctgatttacttcgacacaataattattttgttcgttttgatttgaaacgaactggatgaactgttgcgcatcgttttcagaataaggatatggtaggctatcacggcaattatcccatatctttttattattaagatatttagctaaagcagggaagtcttctttagcccaatttcttattttatatttatctacatccatttctttatccaatttatttaccattataaatttgctgcatgaaatatattgtggctatggaaaacatcatgcgaaaagtaattttcttcttcatattgttgctgttttaagtgattgaacattgatttcttaaaatggcaaagaacggaagaataaagaaaaaaggtcttgacaattgtcaagaccccggtataatggatgttaaaagattggctatttctccagtttgcggcgtatgcgactaactgtttcaggagtaatccctaaaaaagaagctatacttttcaagggtacagtatctttaaggtcaggacaacgtttcattagtttttgatatcgtatttcaggtgtacaatacgaatcgagcaatcgttcatacaccatttcatatagattttcagctacatatcttcctaatcgttgagtttccatattcgtttcccaacattctataatatcatggcgtgatatttcataaacagaacagtctgttaacgcttgaatgctcactgctgacagacaacttttcataaaagaagaatagtcacatacaaattcatcggtaaaagcatatcccacaatgtgctcttctccttcttcgtcaatatgcgtatattgaaatgtgccatgttttacccatccagcaaaacgttccacctcattttgccggataaagaaatctttcttatggtaagtacgcaatatcccttttctcgcaaataaatcttttacaagggaatagtccaaattgttgagatatgagttaaattctttcattattgtaagctatttgttcaatttgcgccgtatgcgactgacagtctcaggagtaactcctaagaatgaagcgatttccttcagtgttatgtactcttgaatatcggggcatttgttcaataagtcaagatacaattcttctgtagtcttacagtacatatccaataatctatgatacattaataagtatgattgttcaacaagagtacactttatttgcatggtttcagcatttgtggcaaagaaatgctccacctttgagtagagtatataacaaatcgttgtatcgcaaacagcttcaattgtaactaatgacggttgctcaggttctataagtgtacataaacttcccgtaaattctccggagaaagtatatcctactatgtgtatgtttcctttttcatccacacgagtatatctcaataagccgtgttcaatataagctccccgatgattcactttgccttgaatagtgaatcgttcgccctttttgagttcgatataagtaccatgttccaaaatgaacagctttagctgttctaatttcgaatggttggcatattgtgagttaaaatcttccatactataaactaattacaattgaaatatagaataacttcgtgagttgctctcttaaaaaagaaaaatagattccttactttatcaaaacatcttcctcctttttataaatctactttattgtgagtttagtttgtgcttttgtatatatatccaaaacgaactaaacttatttctattgactgaaagtatatgctggcgaaagaagaaataacctttttcttttcgccaattttaaagtttgtaactctcatagtttgaggaagaaatgaactcttttatttcttcttctgttggaagctctatcctatacttctgtacaaagatatttgggtctaatccggctgtggcatactttactaatgtatctcccttttcagtgcaaagcagaataccgataggtggattatcatccggctgcatcacttccgctttgaaatagttcagatacatatttagttgcgaagcatactcatggtggaacttgtctatcttcaattctacaataacatgacatttcaaaatacggtgatagaacacaaggtcggcaaagaaataatcttcatcaatcaagatgcgtttttgccgggcttcaaagcagaagccatgtcccatttccaataggaagcgttgcaagttgtcaagaatggattgttccaaatcgttttccgtcactaatgcacgttcattcaaccctaagaattccaaagtaacaggggtattgataacatctttaggttgtaataaggttgcttgttgctggactaaagcggagagggcttctttgtttttggatagtccgctacgttcgtaatataaagatgcgatttgtcgctccaactcctttacagaccagcagccacgaatagtttccatttcatagaaagcacgttttaccgggttctcaattcccgatatagtgtttaaatgggtggaagataatctgttgaataatctatcagccggaatcatccatgtttcggtttgtgggtattctgttgatagtttccaaacgccattttcagattcggcggtcactaaccgccgaattggttctgtgaattcggcggtcaatgactgccgaatttgaatttgtgatgcaatatattgtgtaacaggttcttttagttgtggataaataaggtacaaccgcctaaattcacggaatctacgttcattcagaccttttgttttcagttgttgttccagcttcttcaacagttgttcaccgtaggcggcacggtcttctccgttctgctcaaattctacgatatagcaccccataagccagttacgggaagtaagggcaaggtttacagcgtgtgcggcttgtgcctgcaacgtgttctgtatcgtactgatatgttttactaatgcttcaaagttcatagttacaaagataagtcttttgtggttaaaactttagttcgggtaggctgtttattgcttcctctttcaatttatccaccgcacgggtgtatttttctgtatgcttcaatccgctatgtcctaaaagactggctacggttttgatatttgccccattgttcaggatgttcacggcaaacgagtgccgggcgcaatgccagcttatatgtttgtctatcccagctctttttacccaacgctttaccgacttgcagcagctttcgtatgagggcaaatcgaatatcaagcaatctttgtctgccggagcttcaccaataatagatagcagaccgtcattcagagggataaccacaccgctactggcagaatgtccctttgtcttgctttgctcaaacttcaataaccgattagcgtaatccacattcttataggtaaggtcttttacatcacagaaacgcaaaccactgtataagcagaagataaaagcccgtctgacattcgggttctcgttgtcataatggcaagccgccaacttttggatttcttcgggagaaagaacatctttccgaagcatttggctatccactttgcaggcaacacttttgcatgggtctttcaacattacatcgtggtcaatcgcatatcgaataactttcttgaaacgctggtaaatgcttttagcaccctcacccacacttcgggattgcagataggctacaaactgctccatcatttctttggtgataagttccggtttgatactaaactcattcatggggtattgctcttttaagaagtccttaaaacggttaagcgcaatttgtaccatgcgaatatctttcttggtataactgttgatataggcttggaaatagtctaagaaattgaccgttctatcttttttcaaccgatagcccaacatgctttctttaaactcctgttcacgctctgcacgtatctttgtggcaagctccaacgtttctttgttctgctggcgttccgcaggggtacggggtttatctatcagatacaggctaaggttttcttttcgcctgttgtgctttactgtaaacttgggcttaccttgcatctttccactatcatagtacacttgattgccgttttcatctaatacgggcttttcctctctacctaaataatactctaagtaaaggctaattctaccatccgagagcttattttgctctaacttggggttttctttcgttttattttctaactttgccattgtttagaggttttatcccgatttaggtaccataaccgggtgattacgctaaatagttgattttcttttgttttccgatattgcaaaggtacaaaagaaaatgatatttcaaagtgtactaaaagtgtactgaataacggaaaatgggcaaaatatggcaaaaatagagaaaatagaaaatattcaagtaattgataataaggaagataaattcttttgttttcctatgatttctatggcttgtaccgggtctgggtactgaagcggagaaagttgaaaaactctctccgcttttcttttctactccccgtaactcgttggtttgctgatagattaaatcaagaactttattgtaagaattggttcgatatgtttttccgtcaaattcgattttttcgggaaacatcgaacttattagcttaatcttcacccctacagacgcatttcttatatagctatctatattgtttatcagattgatagagtagtttagttttggttcgatattactgcggttagggttctcacgcatttcaacttgttgttgtatggttgaggcttctttggtgtatctctccaacattctgttatattcttctttggttaaatctccgtccaggtatttatcctcaatgctgttgatgcgtttttggacggtagaaagttcattttgcagtgctgctacttcttttttactttctcctttgcgttcactttgcaaatcctttagaatttcgttatacaagtccaataccgttttattgggctttaattgggctgtgtatcgagcgaactcttcatttacgttttctgatctcacccttatatgtttttgattgttacaacaaaagtagtaggtgtatttgccgccattgcccgaacttgtcgcaccagttaaggcacaaccacatacggggcagattaaaaacttccgcaaatacaaatcgggatttatggctttggatagtttgggtgttttctttcttttaccgtccaaaatctcttgaactttatagaatgtttcttcgtctataattgcttcatgttcaccgtttacataatattcgggttctcctttgtatgctggcacacgtattttgccaatgtagaatttattacgcaacatttcaagaaatgaactttcaggtatattatatccttttcttgcaaattttctacggatatagcaaggtgtttcaatatctttagccacttctttaaacatggcttgtataaatggtgctgtattggtatctatttctacatgggtttcatgtttgctaatacgtacattcttatatccttcttggtgctttattagcacattttccttttgccaatgttccatgaataccgtccattgtatcttttgaccttttgatgttgtcgcattgtgcctgtactccaataataggggccaggtgtctgaattgaagtctaaaggtgcttcaattgcatttggttcaactcccgatttaagtaattcttttaggttctcactggcactgataatgtctcgtgaatatctatcccactgcaagaatagtaatttgtttactctacctttgtttttacgtatataattcattattccttgtatgacaggacgcttttcaaatgttttagcactctcatcctctctgtatgggatattgtcaatgatattatatcccatttggttacaatacttccgtagacgttcttcttgtacgtctaagctggctcctaatgtttgttcatttgaacttactctataatatattattacatttgcattcataattcttgttttttagttaatgctattttttcattctctatctgcaattttgctaattgtaccttgcagatttacatacctcatttttatgtaatttaacatatcctacttttagcaagatattactttacagttgttaactcttttaaagtgtccgtatcttcattccgattgctaaaaattgttttcctattttccatccgataactgtttcccgacagctgtataatctcacaacagtagagcagtctgtcaagcaatgccgctgcgacagcttcctctcccggtgttaccagtcattctgtaagggagtagttggctgtaacgataagcgatgtcttttcctgaaactcattcaccagtttgaacagcaacatgacatcttctcttttcaagggaaagagtgtggcattgtcaatggccagcagctgtgccttcgtgatccgtttgtaagttttcatcgcatgccgggaaacatcccttgtcttcaggcaggtcagaagatcttccagcgtaaccatatacgccctgtatccgtttttcaccgcctcatggacaagcctggtggcgatataggtctttcctgttccggacctcctccctgagacaggcgagcagaaactccggataggtcagctgcttttcctgggcctgatgcagcagttcctccagatgttcggccagattgcccagcttgagcatacgtgcacattccatgagttccttcttatgtcttgtcatattccctaagtatttcgttataagactgtatcaagccgccttgtcggggcaggcaatcctccagtccgtatgtttccgttccattgtccttccccctgcacacatattcacacaggcttttaaccgagtccccgttatagatgcctttgtcaaggcatatgcgtatggcctctatcagcgtgttcttgtcatatccgggaattatgcgcaggatcacctccggattatccctgtagtaacgttctttcctccttttcagattatccatccacatggctacctccctgttgtcggacacatgaaaaaggatgcgttcggctattttcactccggcgtttctcggtttcctgtgggagtcgtcataaacggtccttcccttccgggtacagagcacatgccggcagatgagcttccccgtatccttgttgtacagctccacattcccttccgtctcctgcagccaagttgtctgcccgctccggtaagttccgcatggcaggctgtaataattccccctgtactgcactgtattgtccttgcggacatggtattccctcatctcctcctgcggtggctgtggcgtcccatgatagggtatgagaaaacttttctccacggcaaactcttcccgtgggacaagacgggcggtcccgtgcaccttcccgttccccgtcctttcgagccattcgagggcttccctgttcagactgtcgatatcacggaacacacgtgccaccagaaagttctccttcacatatttcactacgttctcgaccttgccttttgactcggggtcggccttatggcagaacaccggctggaaatgctgctccctgacaaacgtctggaacttccttgtcagcaccaggtctcccaggttctcccgggaaatcagcaccctgtcctggtcataaaggatcttttccggtttccctccgaaatactcaaaggcgcgctcgtgtgcatagatggcgagctccgtgtcgaaagggcgacggctgaaacaggtgaacttgtagcgtgaacgtgccaggacgatcgcaaaaaaatagactttcgtgcttctgccgttttccgcggacatccatttctccccgaaatctgcctgcgcatacttcccatagggggtatccggcagtttctcatagtccctgcgtatcctggcctccgacttctttccgatgccatatttgcagcgcaccttttctacaaaattgaatacggtcttgtcgcacactttcgggaaatccggatagcattctctaagccagtcatgcatccgtgcggccgatatgtacggatattcctccagagtcccccgcacatactcctcgtatcctgccagtttcagcgtgtatttgcgatgcgaattccgcctccttacaaaatcttcccgggacatctgcagatatttccgcacggtgcttctgtccactcccaggtgcttcccgatctgtgtcttgtttaatcctttcgactgaagctctctaaccttgtaccacatatactgtttctctttaaaaaatcggctcgttgttatcataatgatgtctgtctttttgaaccggcaaagatagacatccccggaaaagtgcggtattcgcattttccattttcctgctgataaagttacaaattacatacagaaaggaaaaatatacgaggtgcagtacagcatcccggaaggctatcccgaaaaactcctcccggtgaaggtgaagataacctccaaccacagcgtgcccagccgccgaaagaccactttgtggccttataccaatgagtttcgacatcgtgcgcaacggagaagcccaaaaagtcaatccgccctatgggttcaagtacctctacacgatggataactatgattctcccgatggaggctcttccttactattatgatttgggctataggtttacacagaaatattggggcaaaggatatgccacagaagcttctgccgctttgatggattatgctttcaataaactgaagattccgtgtgtctatgccctcattgaagccgacaatttgaaatcaaggcgtgttttagagaaagtaggattccacgaagataagcctatgacgattgacggtgtacctcatgtacaattcaaagcataaagccaatgtgaggacgtaaaccatatctgtatgggacatcatgataaggaatacgtttatttgtttatgtgttatcgtgataggaatgttcgttttaccttttgcggcactctcctcgcattagaatataacggtatgacattgtatgatattaggtattaaggaacaaatgaacaccattacaaatcgttataacaaatggttatacttgttccatatttcaagttgctaagatagctataaaaaccgaaataacaaaaaagggagtgtggttatgctccctttttagtttggtcccaatttatcttccatcctattttcagatataatataatgaagaaatatccaataagagaataagaaataatatctattatagtatttattgttggagttactatactaaaattaaacagtccgataattaacatacaaaccttcaaaacacatccaacaaaggctattaatgctgctgttccaaattttacaatcttcattttttcaatgctttttcaaatagtgaatatgtcttaattagcttctttgcgttcttttcttttatatcaaaatcgtaatatccatcattggtataaatcctaatagcagtcattgttttatctttgaaaaccgaacagtttccaatcaaggttaattcaactccaagcagattcattccaaaagcaacgacagccccacctccaggtgtagataaagtataatctttgtttttaaaattgtaagtatttccatctttgtcaagaaatacaatatcagcatcagagtcaacggacaagacttctttactgcaccatcttaactgggcaaaatccaatccatgatcatgtgcaaaacgtaaccaaatgtttttcccaataggagataccatcatgacagattcagaagatatcttttcaaaagaagtatatacttttttctctttggaaaatttgtctacttcgtttattttcaaactttgtccatagacagaaacacccataagtaaagaggcgcataataaacaaattcggctgtgcataatctaataatattaatttttgcacaaaaatataaacttgtatttttaccgcattaaatctaagttatttttatgtaatgttaactatttgaagaatatgcttttagtaaaataaaattgcaaaattaaacaggtgtgcaaagatattagagagccattttatacaatgaaattacgatgattatggaagtggcaattataaatggtagataagtgttaaatctatctgctatggccatgagcatgaatcaacattaatgtttgatacagaagaagaggcattgaaagttactaaaggatacatatatttatcttaacaaaataacaatgaatggagtatataaagaatggggaaaggcgataagtcatttaaataaatagtccttgtgcacccttatctctatttagcaacttccaaaacactattttctatttgggaaaaggaataagggtagccttgtttgctaatgccattgtgagagccataaatgacactgcatcacattttcctacaatcggctgttgagccaactcatagaaaatacctacgtgataatgattttcatcctccacgttccttttaacccttgccgtacaatccattatatcctgagtatgaataataccaacatttaatgttgcatatccaaacacttcatcgccaggagtgcgcggaggaaaagtcacattttctcgtgtgggagtcttgtgtaaagtgcgccatacggatagatatttctcccatttaccactgcgtaattgttctaagaaaaacgcattacggcttatcctcccttcttgaaccattgttggagaaaaaaggatacgggcaacttcttctgattcatcaacatcgtataatgtttgagccatattaagtaaactagccaaataggttgctcataacaatgagagcatcaaccgccttatctacattaaattccctctgttccattatagaatctcctgattctttcatggcaacatacgagaagtctttgtttccgacactcattgccgcaatctctcgttctttgaactcaaaggaaatagtgccgttaggtgacggaaagacattccacaaccgaagaatcgaatcaggggtatccattactattttacgggcatttaagtatgaatctcgttctatgggaaaggcattgtaaccatcccaaccctctttgttcaatttacagaagaaattagaaagtttccctagcatcttttctttttcagaataagaacctgtaaaagtcaagatttccttttctatacgttcaatctttgcaggacatacaatatcattaacactaaccaaatcactattggaaacatcacttgtctcaacattatcagacgtacaagcaactgcaactatagtagcaaggacaaatcgtgttacaacctttctctttttagccttaggcaaagatgctagagataaaaaagtgtaatcagttgtttccataatattattgctgcaataaattaatcgttttatctgaaaccatattacaaaatgcactgaatataatatgattcaatacatctgcgttcgcaattatatctttagtgtcaatatcataaacagttcctattaaatccatttgaaaatagaaattatctttatcaacaacttcaaccaaaaaaggtacacgaacttcgcccccatcaaattttccagccccctcaattgttattttaaacggtttgtcactaacagatgagttagcagcaagttctctgagactttcatctttaaaagattcatgtaacgcaaatctccatgaagaataagcattgggagaagttgctttaaacaagtttttcttagagattgtcaaagcctctattttttcaattcctaaagcctttaaaaattcaacaaggcgtttcattttaggagccaaagtaactttatagcaccgatagatgctggcatcgagtgttaacgatgcagaagtagttgagaaattatatctttcaactgccgtttcggctgataaggttattcctccaactgtcagggttcccggaaagtattcaattattccaaaatttgatttcaagaaatgagttattgcttctttattattcaacaaaggtgtttcgacaaattttatacttgccgaaacttcctgtagaaaagtccgattaaagaccttgtgaggaatctccgaatatggattttgtataaccataattttaggttgcgaaattagtcaattgtaatcatagacacaaattttcaagcatgattttctaaacttttctaaacgatttgtctccattaacaatatttttccaattaaaagtatgaagtgcttaaattgtttcaccccgattaatcagaacttcattgttgccaacaccttgttccagctggaaatgcacccctgcttcttctactttattataccagcgtactagatataatatttaatatatccaactgctttatgtaataaattatatttgtttaaccaaataaaaataaataatttttcagaaaaggtattcattttttcttttcccccttattcattgcttccagaatctttatccatgattcaggaacttccacatccatgatgttcccatctccatcttttacgatgtatttattcttctttttcttttcgtcttttggcttttctttcttatcatcctgcatatctgtaatctcctatatctaagtattgcaaaagtaatctaaatctgtcagaatcgctaagttttctagtattaaatctaaagacaaattcatctacatagcgttgcatatattttttgcttatatgataatacgtggcgtatatcctcttgaaaacagaccaagcgttttctatcgtattggtagtaatcatcaccgtttctttattatcattgtaataagtaataccataatatttatgcccgtgatctacagatatttggttgtacatttcggatacttcgccataatcccatccatcagtatatattgtacttccttcttcaacatactttcttataattggaagcagcttggatgaacctgttccgcttactactttggcaaccaaatccccatttctgcctattagtccaaaaacaggaactttgtctttaaaacttctcccctggcatctctccacttttttatccttatgtcggtttgcattttttccacctgcaaatgattcatcaatctcaacttctccttcaagatagtagtcgttttctcctgtcatagccttacgtatcttatgcaacatacgccatgcggtcttttgagaaacatcaatatctctagatacctgataggaagatatgcctcttttcccttgagcaaataaccacataacatagaaccatttagtaaaaggaatcttactgtttgcaaagcacgttcctgtttttactgtgaaatacctgtttgtgttcttgcatttatacttatgattcttgcatttataaaccttggaggtaggatcaaatggagaaacaactttgtcaccccatttccattgttcgtacaggtcataacaagcattttcatcctttacaatctgtataaactctagaaaattcattgactttttcatacagcctccttttctttgattcttttgcaatataacgataaaaagttaaatatgcaaataaatataaagaaaagatagactgtaatattatgttatataaatttataagtttaagttgacacaagcagaaaatatataattataacattttgttatagcttatttatcaagtgtccatttattccttaatacctgatattattcttagtcctcaatccagtgttctcaatcgtattgggaacttttttcataaaaccgctgaaagaaagaataatatttttcatcggttttatttagaaagaataaagttgttcgtatatttgcgaacataaaaataagaagactatggaatccaagaaatatacattggaacaagagcagatagcccgctttgccaaagcgatggggcatccggcaagaatggctattcttgaattcttagccaagcaggattgctgttttttcggagatattcacgaagaactccccatcgcgaaagcgacggtttcacaacatctgaaagagttgaaagaagcaggtttgatacaaggagagatagaaacgccgaaagtgaaatattgtatcaatcgagagaattggaaaatagcttcgatgcttttttctaaattcttcggacaatgtgtatgcaaaaaggagagttgttgcgaatagggacaatttttttaggattattgttcgttgttttgcgaataacaaacacaaataacaaccaataaaaacaaaagcgtatgaacagattgattttagccttgattatcagctgcggattgactgcttgcagtaacaatgggacaaagaagagtgcttctactgatgtggagcaaacccagccacaaaaacagaaagaccgtgtggaggtgttgtattttcatagcaaacagcgatgcgctacctgcatggcaatagaaaagaacgccaaagaagcggtagaggcagaatttgctgacgaactgaaaaacggaacactcgttttcagaactatcgacatttccgaaccgaagaacgaagctatcgccgagaaatacgaggttacatggtcttcgcttttcatcagcaaatggaaagccggcaaagaaacgtatgaaaatctgaccgaatatgcttttgccaacgccagaactgctcccgccactttcaagaacggagtagctgaaaaagtccgtaccttattgaaataaagttctatggagtggttacagacattattggacagcagcacggctcctgcacttacggcttttcttttgggattgcttacggcgatttcgccctgcccattggctacgagtatcgctgctatcggatttataggtaaggacattgaaacccgccgtcggatattcctcaatggcttactataacgctcggtcgtgtaattatctatacattgctgggtatcgtattgatactaatactcaaagagggttcaagtcttttcggtattcagaagtttatcggcaaatacggagaactcgtactcggccctgccttgttattgataggttttattcatactgttcggaggcaaactgaaattaccctctttcggttttaagggaaatggcgagggcttagcccgtaaaggaggatggggagcgtttttgctcggcgtgttgttcgctatggcattttgtcccaccagcggagttttctatttcggcatattgattccgatgtcggcaacgactgttgcaggctatctgctgcccgtccttttgccatagctactgcgttgccggttttgattgtcgcttggatattggcattcagtgtacaacatatcggcagtttttacggtaaaatgcagactgtacagaaatggctgaaccggattgtcgggagcatatttgcgattatcggtttgtattattgtgtgattatgtatttataaaaaacaaaaacatggaaatcaaagtattgggaacgggttgcgccaaatgtaagacaacctatcagacaatcgagaaagtaattagcgagaacaatctcgaagacgtgaaatttacgaaagtagaggatattgtggaaatactcaattccggcattatggccacacctgccgttgtggtggatggagccgttaaagtcaagggacacgtcccgtccgaaaaagaggtaaaacaaatactcggtatttaaggtacagttatggatactaaaaaagagttgaaaatcctcttttggatgattgtggtttatgcagccgtatttttcatgccactcggcaatgagaggttcatgacggctgtcgatgcaaccctcgaccttgctaaatggtatgcgcaggaacacgttatgttatgtctgcttcccatctttttcatcgcaggtgtgattgccgttttcgtcagtcagggttcggttctcaaatatttcggagcaaatgccaagaagtggttatcctatacggcagctgctgtttcgggtagtatattggcagtctgttcctgcacgattctgccgttgtttacgagtatttacaaacggggcgcagggttaggccctgccatagcctttctctattccggcccagccatcagtattttatccatcattttgacagcccgtattttgggtgtagagatgggtgttgcacgaacggttggagctatcggattctccgtagtgatagccttgctatggcatttattttccgtaaggaagagaaagccaaacaagaggaacagatgattattgttccactgctggaaagacgcccgatgtggcaaacctcgtttcacttttatcttcacctataaatggtatattacgggagttcttgctctgatgctctgttggtcgcttgtccgaatattgaaattgcgtccattatgggtatgtgccggagtcgtgataacgattgtttctgttttccttgcagacgcccttattgctaaagccaaattagtaccgctcgttccgatggttgtgggtatagcttcactttccatcatcttgctgtttgataaacgaaacgaggaaaatagagaatgggcattatcatcatggggattcgccaagcagatattacccttgttggccgtcggcgtagtgacagccggatttcttctgggttcgacacatgataacacgtcgattgccggagttatttttaacgagtggattgaatgggcagtcggtggaaattcgctgctatccaacttcttcgcaagtttcacgggagtgttcatgtattttgccgccctgaccgaagtgccgattattcaagggttgttggcttcaggcatgggaaaaggccctgcgcttgcgttactgctggccggcccgtcgctgtcgctaccgaatatgttggttattcaaggtgttatggggacaaagaaaaccattgtttatgtagctttggttatcatcatggcaacaatatcgggttttgtattcggaaatttcttttaagtttcccgtttatattgttaaacagacacgaacaaaaattattgctcgtgtctgttttgtgtattcaaataattgctttatatttgtattcagaaagagttatttgacagcatagcaatgcaaaatgttgaaattcgtacagttgctaaatcgttacctctatttcttaaataattcgctaaaagtttattccccaattggttaagttaaaccgagaaaaatctaaaataaaatgttttattttcataattgttggttttatggtaccagcaaaatgggtttacatgcaatcctttttctatcagataggtattacgtctcgtgatgagacaggtttgtcctttggactttgttatccgatggtgatgtcgcccgacaccgttgccttgtgtttcccagccctgaatggttacaccgctgacgctgataccgtttttattgatattcagttctatgactaattgcttgtcaccttccaaacgcttgatatcctgtccttcggatgtggtctgtgggagtttggaaaggttgtagtccttcgtttcattgcctatcttgatttgttcttctgaattgagagaaaacaagaatagcatgtaatttcccattcaaaaagcggacggagagtgttggtttatcggtactctccgtttgcttttttatgctatcttcattgtccgtatataggcatttttcaggttacaaattatgctgcctatacacggtctgtgtctatcggctaaaagaagactcattaaaaataggtatattccccgcctgaatcgcagcgattatgtaaaatttatacctaaaaaaaggtattgcagatatttttgatgaaaattaattttgcagtcgtttttaataaataaatgaaagaatgaatcaggtcaaaatggtattaatttttgccatattattatttttatcttgtgtgaatgtaagtgcccaagtaataaagggaagagtaaccgatagtaccacaaacgaagcgttaagttatgccgccgtggaaatacgttctttcgaggatgatgtttatataggaggaagctccaccaatgaaaaaggagagtttgagtttcatctgaaagggaggtatcccaaaattcgtatcacagtttctttcttgggatataagacaatacaaaaagtatatgcccccgctacggagtacagttacctcaaattcgagatgcaggaggactcgcagaccttgaacgaggtcgtggtgaaaggattgagtcctgcggaaaaagtgcagcggttggcctataatgtatcattggtggaaacggccaagttgaaaagcacgacgatggacctgtccaatgtcattgacaaaatcagcggggtgaaaatccgttccacgggaggcgtgggttccgaagccaacgtcactttgaacggcttttccggtcggcatgtgaaaatcttcatcgacggtgtaccgatggacggtatgagttccgctttcgggctgaacaatattccggtaggtctcgccaaacgtgtggaggtgtacaaaggtgtcgtacctatcgaactgggcggtgacgcactcggcggggctatcaatatcgttacggacaacagccggtgtacccgtgtgaacgcctcctattcgttcggttcgtttaacacccacaaaaccaatgtctatgcggaacataccacaaagaaaggtttttatgtttctctgaatgcctatcagaactactcggataacgattataaagtcaatatcgacagttacacgaagttcaacgaggatggcagtaaccaggaggttaaagaaaatctcaccgtgcgccgctttcatgccaagtatcacaacgaggtagccattctgaagattgggatagtggacaaaacgtttgccgatcgtctgttgttaggcttcatgggaggttacgagtataaacagacccagaatgcctccactatggactgggtgtatggtgcacgctacaccacggccaatacgctgatgccgcaactgacttacgaaaagagattcaaagtgttgaaggggctgcacgtgtcgctgaacggtaactacaacttcggcaagtcctattctgccgatacggccagttgtaactacaactggctgggtcagagtcaaccgaaaggcgtaccgggcgagttgtcgtacatgaagtaccgttaccgggaccataatggggcggccaacttccgcatggcactctttcccgcagacgggcagtccgtgtcgctgagcagtacgctcaccaccttctcccgctccggcaaggacgaaacggcctacaaacccacctatgagcatccatcgcagagtatgaaaatcgttaccggattgagttataagtatgactacaagggcaagtggaacacatctgcctttgtgaagcactatatgaaccatctggaggcctacctcgatccggaaggcggaatcaattatcaggatttcagcaacaccacttcctattggggaggaggttgggccagtacctacttttgggggcggcacacacaactgcggttgtcgtatgaatacgccctgcgtctgcctaccagccgtgagttgttcggttctggcgacgacattgagcgaggcaactccaatctgaaaccggaatcaagcaataacgtcaatatcagtgtcacagccaatgctgtggatttgaccgaccaccggctgaccatcgatgcagcttttcaatacagagaaatcaaggactatattcgccgcacgaccaacaacgacagtgggcgtgccagttcacagaacgatggtcgtgtacgcaatttgggtacggacttgagcatccgctacacttttaaggatgccttcttcgtgggcggcaacttcagctacatcgacatgcggagcttgaccaggtacgtgacgggcacacagcaggagagcaagaactacaaagaacgcgtacctgctatcccctatatgtatggtaacggagaagccgggcttaccctgcgcgatgtgtttgtgaagggaacagtgctggacatacattatatgatgaactatgtccagaagttcagttacgagtggaatgtgtaccagaatgcggaacttgatatacctacccaattctctcacgacctcttcgtcagctacaacttcggaaaaaaatcggagtttaccgtatcggccgagtgtaccaacatcttcaatgcccgcctgtacgacaatttcaagatgcagaagccgggacgcgccttcgctatcaagttcggctatagctttatgaagtgaccattatataacaattaaaaacgataaagtaaaaatgaaagacagattcaaattattcagcatggctctatgcgcatgtgcatttgcagcttgtaatgacaatgaaggagttgatggacccggtgacggtgacaaatcccccgtgcaatatgtagtgatgagtgccacatcggacggaacggccaactatttgcagttggccagcgaccccaccaaaggtacgattgacccgactgaagcgaacgggcgtatatctttcgatgcaagcaacccagattttgtcaactacaacaacgaactgctgattggcatgaactatccctcacagggaggtacaggtggctactcctatgcttggaagctcattgacgggcaactagttcaacatggcaatggtataatgctggatggcgacgtgaaagcacgcggctttttcaatgactacttgctcggtctgtctgaccaagccgaggacaacaatcactatacacgcgtgaaatacgtcaaggtgactgagttcagcagtgtggtcgtagatggaaaaataaactgtcaggaccgcagcaaagaaccggccagccagatgggcaatgaggcatggggggttggtgacatagcccagtacggcgactacgtgctgctggcctataccaccaaacatctggtgcaggatggtaactacacctcaaaagcagcaagcacccgtgcgaaggcttcctatggtacagacttggacaacaacttctatttgggtgtttacaagttcgacccgacagatgcggataaagaatatttgaaataccaaagcatgattgtccgcaagagcgaagaccatccgggaaaagaagccggacagatcaaaggcaactctaggtcgcgcacggaaacgggtatcgaagtcgttggtgataaaatctacctgttctgccaaggcggcaagaacttccaaacgaacagcctaagagtaccttctgctgtgctgcgcatcagcggtagcaatattcagagtggcaagcccgtagatatcgacagtgattactacgtagacctaaacgataagacaggcgaccgctatttgtggagatgttactatctgggtgacaacaagttctgcctgcaactcttcaccaaccccggaatggatgggtacacggaaggcacacacaagacattcggcatcttcgacgtagaaacgcaaaattacacgcctgtgaccggtatgcctgaagccggcgacatcaatgacattgcgcttgcttatgcttctgacacggacaagggtacagtgactttcgaattgatgactacgtcgggtgcagtcctgtacaccatcaaccgcaatggcgtggccacgcctggcacgaaagtggaagctgaagtcatcaagggagcaagtctgttgaaacaaaaataggcctttgtatgaataaagtattccgaaaaatacatttatggctgtctgtccccgtcgggttgataatcacggttatctgccttacgggggcggcccttgttttcgagcgggacataacggaaagcctcaatcctaaaatttataaggtcgcatatacggaaggggacactcctctgccgccgtccgaactggtcgcctctatccgccagcaggttccggattcgttggaattgctctccctgcaactgtcgggtgaacgggacgtcgcctgcatggcaacattcaaaggtgcgggaaagcgttcgttaagcgtgaatccatacactggagaggtgaacggttggaccaagagttaccctttcttccagaccatgcgtaaactgcatcggtggctgatggacccgcctgcctataagggggcaaaatctgccggcaaggttatcgtgggtattactacctttgtaatggttgttatcctcgtttccggtattgtgatatggataccgcgtacccgtaaggcgctgagaaaccgtcttgtcgtatcgtgtacgaaaggttggtggcgtttttggtacgacagtcatgtctcgctgggcatatatgttaccctgtttttgctggtcatggctctgacagggcttacatggtcgttccaatggtaccgcacggcagcctatggactgttcggtgtatcgacagcccgtcccgccatgtccgctccgcagcagcaaaataaggatgaaaagaaagaaaaggcagagttcgattatgggatatgggataatgtggtttccgaactgcaggccctttatccttcgtatgcctctatttcgctgacggccggaaaagcacagataagcaagcccggtaacatgcgaagcagtgacacggcggcgtttgatacccaaacaggagaaatcacgaccgttacggcttatagcgatgttcccagagcacagaagatgaaagggtggttctatgctttccacaccgggtcatggggcggaatgacgacaaaggtcctttattttctggccgctttcatcggaggaatcttgcctttgagcggttattatctgtggttgaaaaagaaacgtttatcaaagaaaaaagtctttagaactatctttgaaacaaaatgtatataaaaatcctaacaaatgtcagtcagatttttttatgaataatttctttccaaaatctaggaggaaggaaagtagaaatagcgtgtaattcctgtcgtgaaaagaaaacggggagtggcggtttatcggcactctccgtttgttggtattgcctgacggatgcaagtcccgagtgaatcctaatagcaggaatcgcataaccaatggcaagggtgtctatcgtgagatggcttctgaaagaagttggcagcaaacatttggcttgacggacaaaaacttcatacaaggtatttaatcgtggacaaggttaccaaacagaccaaagcctcatagctattcagaacggttggtgcaaataaaataagtataagatgaaaagacaagatctttatccaaggaggtcacacaaacatgaaggtcagttttttacgagtcatgtaaagtttgctgcaagaaattagtagagaccatagtactcgaggcattttacaagtcttttgtagctagatgtccgaaaagaactctctatccacacaatagggtggaatctgaaaataagatagaagtgatgccatttattaaaaggatggctgaaaataacttgtccaacttggatacaccaggttacggacagtatataatttccgtatttcaactacactttgtttaccgttcgtaacgtccaatctactggcaatatattttcagaagtctccgcaaacagtgattcttattatttttcgatgcaaaattttgtgttccaacccactcgaactttattacaaatacttatatcatgatatattgattattagagtattattagtttgaattctccaaaaacaagctatatacaaaccgaagctatttacttcgtattaattgcatcaaatcaaaatacaaaaatacaaaaatggaacgaatagaaaagcaaaattttcttatgctgcaataggagttttattattaggattggtatcctatgacagtaagaatagtggtctgaataattaatatcattgataggatggtggtatgaagaagcatatatctttattaattgcgttaactggcattatctcgttaaatgcgcaagatttcagatttggaataacgggcggaatgaacttgaattctatcacaaatgagaggaacaaggtagattataatttaaagacgaatatttcttcaaagaagataaagggttttatcttgatatgggagttatgctgaccaataaaaattgggaaacaccgtattatgcccatatcggagataaagacaaattgggaaacatgtggagtgcaaatcttcattatcttaatatacctattcacatagggtatatgatgcctgtatcaaaaaaaatttcgctattcatgaatgccggaccatattggggagtaggattgtttggtaaatatacgatgacatcgggtgataaggataccactattgctgaaaatatctttaaagattatctcaaaagatttgattgtggtataggatggaataggtattgaatgtgcaagatgtatcaaaggttgtcaaagtaaagtcctgtgaggaaagccaaaagatatattgtggtcaaccttatattatggtcaccaccgggagcaggatgtttaaaagaacttgtggaaagaacagaagaaggtcctgcgaaaatccgtgtgtagagagaaaaaaatgtgtgggtaatggcctttaacttagaaaataacaagcatggacattcaagccatactagacggaatagaactgttacctgaagaaaaaatagtatccaaaacagactcacagttccaatcgcgactataagtttgtcctgtttccgagtttccctaacgatggcgcttgacgcgtaggtatacagctttactgcgaataggaaatccgggaagaaacctttggaatgtaggtgcaaatgagaatactcttgaggaatggaaggcttttcttcaagaaaaagaatgaagcaagtctcttgagaaacatggttaactaggtcaaaataatcaagcatgtctgcaggaaggaacaagctcaacatctccataggagtaaggggggggcatttctatttcatgcctcaaagataaccactttaactaattccccaagttttcaaactgacccgtttaatttttacccttgcagacgcatctcttctatctacaccgcagatgaagcgacagggatttttgcatttgatgtgcgattttgcgttgcacttactgcatagtcccgttagaatccgtatgcgaggatggtggaattcgatattttacttgggtgaagagggctttgcatctgtgtgaagagctgttgtcactaaagtggaactactgcttcacatagatggagcaacagtatatatcggaagttaacacaatgacatcctatttaattaaatgaaagtacggcatgtcctgtcagatctaatctgatatctgcggctcttttacaaataatgggcgaatgttcccatccccatcacctgcataccagttcagggatattatggatgttttttacacagcaaattgctgataatgagtggaatgatgtgacggaaggattttatgttttacgtaagacgaaatcaccttttcctttggttcttacccggattactcttgttggactctttcagccgcttggtttcacttctataaagtgatactaaatcaaaattgagcatcactttttgaaaccaacagcttctcctgatgtagtaacgttttacgttcttgccttgaatacaggacttgctttttgtatctccgactcaaagccaaaccagtagccatgttctcccttttcatcggcaggaaggaaacacagacgaaggctttctttgtattctccataaatgatattccaagtagcaggaggaatttgtcgtttggtccatactttctcggcgggaagctttttcagtgacatgcctgcctctatccaggcaatactagcctgtatctggtattcggggtagttttgtttgcagaactcatagagtatcaagcctcgtttttccagactcatgggctggtctatcagattggcttttgttaaatatgtaagaaaacgatggaggaattgttcgtcattcaaaatgagttcacgtgtcagtgcctgccatgccggtgtgttgtagaatccgtccaacaagcgtgaaagctggcgggctgtctgcaattcactgacattgatctcgtgggtttgtaatacttcgtatggtggcagaggggaatatttgatacctgattcttccgccctccggcgcatttcggttccgggaagcagtttgagtgactccagttggatttctcctgcagcatattcggccagggtacggacatcttcaaatatttcatgaagatgataaagaggcagtccggcaataaggtcggcatgggtttccatgttgggtaaagcgcacaggaatctcagaccatccagtgcatcggatagtttgcccatccggcggcttttctcaagtacaggttcgcgcaggctttggatgccggcttccagatgaagcagtcctttgggcagcaggctgagttcttcttttaactcttctgacaacagggcgggatgtatttccagatggaagcggatatcgggatggaattccagaaagagtcggagtagttctttggctcttcgagggttgtaattaaaagtacggtctaatacacgtacatttttgatgccatgtgcatggatgagttgtagccttctgcggatgctttcgatggaaagggtgcgtaccggtttttcaccgccgctgacacagaaggcgcaggtgttgaaacatccgcgtgttgtttccagttggacaaagggtttactccagttaaaaaaacggctttgttcaggagggacgagtccggcgaaattcagtacgcgtgctatgccgttgtctttatattctttgtaaggagtgaggtaacagagtccgggcacggtgtgccattgttccggatggttccagcaggttaaccattgtggaaagacttcttctccttctcctctgaaaacgcaatccacaaatggatttttgcggaggaattcttcattgtttcccagaaattccggaccgcccagcaccaggcaggttttggggagcaatgcttttactctggaagcgacatgtatcagttgctcatggttgaaaagccaggtggttgcggcaaggatgtcgggttgatggtggtagatctcgtcgacaatcattcctgcattttcgttgatggtggcagatacgatttcccattctatagaagggtctgtcatgatttgtgcatgtagggctggcagtgccaatgaggaatgggcatatgaactgttcaggtctatccagagaatcttcatatttctttttcttgtttattcggtcggcaaagataactctttttcggtcaatgtccgctggtaggcgatgcgggatgtgccgttgtgggtataaatgatgccacaacgccggaaaccgtactttttcaggatattctgcatcacaaggttgtcgtggtgggtatctacccggatattgttgcaatgctcgaaacaccatttgaagcaggcgtcagctattcccttctgtttgccgttggtagccatgcggtgaatgacgtaatatggttcgttgttcagccagttgccgtcatcaatgcgggcatacgtagggtcctctccgggaataaaacagaatgtgcctattatttctccgttttcattttcgcaaacatagttggtgccgttggttatttctcgcagaatcaattcagcggaaggataaccgtttatccattgattggggttgccatgttctttcatgaactgacgggcataatggaatatttctataattgcatctaaatctttgggtaatgaatgtctgattgttatcatattgaaataggaatgggttattctaaattcattctgtacacattggtctgcttttgttcgaagcctaatttttgatatagcttgttggctgctatccgtgtggggtttgaagtaagcataataagaggtatgccttgttccttcacaaaccggacagcgtgggtgaccagctgtttgctgaatccttgtccccggtatttttcatccattacgacatcttcaatccacgctttgccgcctgtggggctgtgatagatgcctacagtcagcattcccgcaatttcctgatctgccagtaagaaaaacagatgggtgttctcttgggatatgatctctttgagggttgtctcggtcagttttaccgggcggtttgtgagctgctccagcagtttttgtactgcattggtgtaggctgggataaagtcttttagttctactatttctgtcatttttatagctgaaattagaatcggctgtaaatatagtgattattctctagataactgattatttttttatatcttgcttacgttttaataatagatatgatattatgattagacgagtggaacttcaggatgccaaagccatcacgacaatatacaatgaatatgtcgagcacagtgtggctacatttgaaacggaacctttgagagaggaagatatgcgtagccgtattgccggaattgccgtccgctttccctattttgtgtatgaggaagaagggaaagtagtgggttattgttatgcccatctgtggaaggagaggactgcttacaggtatacgttggaaacaacggtctatttagctcctggatacgaggggaagggcataggcagggaattaatggaaagattgattgaagaatgtcgtagggatgggtaccgtgcactgatagcctgtgtcacagagggcaatgctgccagtgatgctttgcatttgaggctgggatttaaaaaagtttcccattttaagaaggtaggattgaaatttggacgatggttggatgtagtggattatgagttgctgttgtcttgaatccgctgtccggaatgaactttttaggactgtatggagttataagcttgtacctaaattaaaataaccaactatgactcaagtaaacattaagagggtttatgatgaaccttctgaacaagacggctatcgtgttttggtagatcgtctgtggccccgtggcatgaagagggaatatttgaaatacgattattgggcaaaagaggtcactccatccaatgatttaaggaaatggtttcatgcggatgtagaaaaaagatggggggcttttgcggatatgtatcaaaaagaattgaaagaatcggatgccgctaaagcgttcattgataagataaaagcttattcgaaggtaacattactttacgcttcaaaagaacaagaacgaaatcatgccaacgtattaaaacattatttagacacacatttgtagtttttgtgcaaaaaacaagtatctttgcaggcaattatggctcccgcttctaaaaaatagggagttttcgttaaataatcaatactaatgagagatgccacccatgtaaggtgtgttcatgtataatgaatgcatctgtaattttgtgtgacattttgggtaaaaagagaaagattatgatacaaaaggttctaattgccaaccgtggcgagatagccgtgcgcgttatgcgctcttgtaaagagatgggtatccgcactgtggctgttttttcggaagccgaccgtacggcgcgtcatgtgatgtatgcagacgaagcctgcctgatagggcctgccgcttccaaagaaagttatctgaatatagataatatcattaaagctgcaaggcaacatcatgccgataccattcatcccggttatggttttttgtccgagaatgctgattttgcccgccgatgcaaagaggaggggatcatctttatcggcccttccgccgagacgatggaagcgatgggtgacaagattgccgcccgtaagcgtatgattgccgcaggcgttcccgtggtccccggtacggaacaaccgttgcaaagtgccgaagaggcggtacgtatctgtaatgcaataggctatcctgtcatgctgaaggcttctatgggaggcggcggtaaagggatgaggctgatacacagtgaagacgaagtggtggaggcatataacaccgcccgttccgagtccatgtcttctttcggggatgatacggtttatctggaaaaatttgtggaggaaccccatcatatagaatttcaaattctgggtgacaatcatggcaatgtaatccatctgtttgaccgcgagtgttctgtccagcgtcgcaaccagaagattgtagaggagagcccgtctccgttccttactccggaactccgccaggagatgggggaaaaggcagtggctgccgccagggcggtgaactattcgggagccggaactatcgagtttctggtggacaagaaccgcgatttctattttctggagatgaacacccgtttgcaggtggagcatcccatcaccgaagaagtggtgggcgtggatctggtaaaagaacaaatccgtatagccaataacgaggtgctgcacctgaagcaagaagaacttttccagcgcggtcatgccatcgaatgtcgtatctgtgcggaagacacggagaacaacttcatgccttcgccgggtatcatcaaacagctgacggagcctaacggcatcggcgtacgcattgacagctacgtttacgaaggttacgagattcccatctattacgacccgatgataggcaagctgattgtatgggctacgacccgccaatatgccatagaacgtatgcgccgggtactttacgagtacaagattacggggctgaagaccaacctcagttatctgaaacgcatcatgcatacccccgactttgtaaagggtgagtataataccttgttcatagagaagaactcgcgtatgctgctccgtggcaacggtaataatgaggagattgagaatatcgccatgatcgcctcttatattgactatctgatgaatctggaagagaacaagagtccccagctgtctgatgcccgtcccatcagccgctggcgtgagttcggcttgcagaaaggagtattgagaatctgattcttcatttaattaagcaaaagtatggaaatacatattggagaccgcgtagccgatgtgacgttggtgagcaaggaaggaaacaaggtacagtttatgattgacggaaaaccgtatgatgtggatatcgttatggccgagaacggaagctgttccatcctgcacgatggcaattccttcaatgccgaactgatccgtggggagggtggaaagagttatgatgtgaatatgttctaccgttcctatcatgtggacatagtggacacccagaccaagtatctgcgtatgaaaaagggcggcgaggagagacaggatgacaagattgtagctcccatgcccggaaaggttgtaaaaattcccgtccggaaaggagaccgtctgtcatccggggatattgtggtagtgctggaggccatgaagatgcagagcaactacaaagtgacctcggactgcacggtaagggatatcctggtcaatgaaggggattccgtcaatgctaaccaggtattaatagtattggatataataaaagaagattgatcatgacaagagaagaaatatacagccggtttgaagagctggacaaacgcgcgtcgctgggcggcggtgtggacaagatcgagaaacaacacgcccaagggaagatgaccgctcgcgagcgtatcggaatgttgctggacaaaggtacgttcaatgaactggacaagctggtgaaccaccgttgtaccaacttcggcatggagaagaagcagattgccggagatggtatggtcaccggttacggaaagatagacggccgtccggtgtttgtttatgcatatgattttaccgcacatggcggctcgctgagcgagaccaatgctgccaagattgtaaaggttcagcaactggctttgaagacgggagctcccgttatcgctttgaacgattcgggaggcgcacgcatccaagaaggggtgaacagccttgccggatatgcctctattttctatcagaacactatcgcctcaggtgttatcccgcagatttccgccatcttgggtccttgtgccggaggagcctgctactcaccagcactaaccgattttatctttatggtaaaagagaagagccacatgttcatcaccggcccggatgtggtgaagactgtgactaacgaggaggtgggcaaggaggaactgggcggtgcctatacccacagcagcaaaagcggtgtgacccattttatgtgcgacaatgaggaggaaacgctgatgagtatccgcgaattgctgagtttcctgccttccaacaatatggaggatgcgccgttggttccctgcaacgatgacatccatcgtcaggtggaggcgttgcagactgtcattcccgaagatccgaatatgccttatgatataaaggatatcatcgaaccggtgctggataaccagtatttcttcgaggtgatgcctcactttgctaaaaatgtggtggtggggttcggtcgcctgggaggtcgttccgtaggtattgttgccaatcagcccgcctggctggccggcgtccttgacattgacgccagtgacaaggctgcccgttttatccgtttctgcgactgctttaacattcctctgatcactttcgaggatgttcccggcttcctgcccggaacaatacaggaacacaacggcatcatccgccacggtgcgaagatagtttatgcatacgccgaagctacagtgcccaaggtaactttaattacccgtaaagcttacggaggtgcctacattgtcatgtccagcaaaccgacgggggccgatgtgaacctggcttatccacaggcggaaatagccgttatgggagctgcgggagctgtaaatatcctctatcggaaatccactcctgaagaaaaacaagaaataatcaaagattacgaagataaattctctaacccttattgtgcggcagaacgcggcttgattgatgaagtgattatgccccgtgacacccgctataaactcattcaggctttggaaatgtgtcacaacaaaaaccaaagcaatccgcctaaaaagcacggcaatatgcctttatgataaaaatcaagattctgccacagattattcagattgacaccagcccaatattaaacagttggttctcaatggaaataaccggtgaaaatctgcgtagcctgtggcggaaaagctttttacctcgtctctttgctattctttattcagccatgcattgatctgtgtcttgatttcttcttgtgtgtcggtgtcaaagctgccgatacgggtggtatggctgccgccgggtaacacataaacttttatgtttttcttgttcttcagccaagtaacgcccgaagctgtccaaggatcattgccgccataaatatagatcatttcgggatcattctctttcaggaattttactaccttattatatagtgtcttgtcaaatttgagatttgacagttcgggcggtaacattaccttatgaagatagttacggctactctttatcgtcagatactttttgaaaggtttgatgtcatatccgtaataccccagttctttggctgcttgcacattgaaagaagggtagggagattgttcggagaaataatccggctcacaaatagccatgaaatgcttgaatagagtgtgatcatcggcatctgtttccggaattttatttacaggagttccccattgccatagggcaaatgagtattccaatacattgaagtcgtatacttcggctataggaatgcggaaggtatatcctttatctgagcaatatttttcgaacatcggcaacagctggtttttgcgtttaagtacttccagttgaaagttttcaactcgtttccggttttcgggagtcgaaactttattggcaatgaacggttcgtgacggccgtcctccaatgatttgttgaggggggctacgtaaggtacggagatatccacatcatcgggaaagtaagtgcgatagaacatcgtagtctgtccgcctttgctgattccagtagctatccatttctgatcgtatagttgtttcaaagtcgtggttacatgatgcaaatcatacagtgaattttcaaccgtgagataatcccagttgcagggcttcggcatggactcaccaaagtaacggtattccacgaatactagattggcgttgaataatttggataactcttcttgataacgcggatgggtggcataatgggcggcatagccttcggtaaccagtacagtggggcggtcaaaacctacatgcgagagaataaccctttgcttaaaattccctgcttcggggtgatgcggatccaatagttgattaatgaagaatacatatttctccggataggcatcactttgcattggtttaatgtcactgatgtccggaagattttgaagtcttttctgtaattcagtgggaggagctgcggcctgggtcatttgtaaaggcaacaagacggccagtattgcccataacataaaagagtgtgtgtgtttcattgtttataaatggtttaataactaattggcaacaaaaatagcattttatttcgatattgtcgggtaatcttttatctttgtgttacttaataaagccgagaaatatgttttttcttcatcgtatatggaattggtgcagtcgcttccgtcaccgttgtggttacggagtacactctccgtctgatttttttctgattacttctgtcgtttatgaaaaatatcactattatgcttatcgggtattgaaggaaagaggatttcctgcttatttgccacattatcgaagaaaagtgaaccgtttactattccggttggttaattatttcagaccaaagtcattgattgaagtgggaattggtaatggggcatccataggatatatgcgggctgcgtgtcataccatgaattccgtcaccttgaaaggcagggattggacaaagacttctcgacaactggaggagaaactgtcggaggtgcatacattagattgtctgcatatagggcatactcctttttataaagaagtttttgaactggtacttccttatgccggacctcgtagttgttttattgtcggaggaattcatgaatcgagggaaaaacggaaatggtgggagcaaattgtaaccagtgagtcgacgggtatcacttttgatttgtatgacataggattggtcttttttgataaagcaagatataaacagcattatattgtaaattttttataaccagaaccatgaagaaaagcatgatatacaccaaaacaggtgataagggaaccacatcattggtaggtggtactcgggtgccgaaaacacatatacggcttgaagcctatggcacagtggatgagttgaactcgtatttgggattgttgcaaacgtatttgacggatgaggaggataagcaaatcatttttcgtgtacaaaataaattattctctgtcggttcgtatctggcaacggatcagacacaaatcgatttgcgtatggaaagtcgtatagaggatgaagacatccggatgttggagcaggcaattgacgtaattgacaatgagcttcctcctttgaatgcttttattctgccgggaggtgaccgtggagcagccgttggacatatttgccggacggtgtgtcgccgtgccgagcgacgtattcttgcattggctgaagaatgtgacatagatgcccgtgtaacagcatttgtcaaccgtttatctgattatttattcattttgacccgaaagttaaatcatttaactaaaacagatgaaattttttgggataaaagttgcaaatgaaataatttattatacttttgcggctaattagagaacaaaagaaaagtatttacttaaaaaataagaaaactatgtactggacattagaattggcctcgaagttagaggatgctccctggcctgctacaaaggatgagttgattgactatgcaatgcgttcgggcgctccgttggaagtaatcgaaaacttgcaggagatggaagatgaaggcgaaatctatgaaagtatagaagatatttggccggattatccgagcaaagaggatttctttttcaacgaagaagaatattagaaagaggacatagcggacagaataaaaaattctgtccgttttttgtttgatatttcttcttggaagggggtattggaaagcgtaatgtaactttcctgagagattgaacattatacatggaaaaagtgtttatctttgtggcgtaaactaaaaatagacaaacatgaaaaagattattagtgtattaatggtagctgtatgtttgatgatggctgctcctgctcaggctcagttgcactttggagtaaaaggtggcttgaacctgtcaaaggttagtttctcgaaatcagatttaaaaggagataataaaaccggttggttcattggtccgatggctgaattcaccctgcccattattgggattggtgcggatgttgcggctttgtattcacagacagaactggctgcaaagggatattccaccgatgcaaaactgaaaacgattgagattccggtaaatttgaaatggtctttcggacttggaagtatgttgggtgcttatattgctgccgggcctcagttcggtttcaatattggtaataagaaaggatttatgaattatgatctgaagaagaacaacaccagcttcaatgtgggggcaggtgtgaaactgatccgccatttacagcttggcgtgaattataattttgctttggggcatactgccactctttatgctgaccctaatataatccttgatggtaaaccacttactcaggatgtgaagataaagaacaacacttggcaagtttctttggcatacttgttctagacaaccttatttaataaaagataaaaaggaggcattcagtaaagaatgcctccttttttgtaattttgcaccatgaaaaaattcgtagatgtcatagttccattacctattgccaaccaatacacttattcccttcctcaggagatggaagagatggtacagattggttgtcgggtgattgttccgtttggaaagaaaaagttctatacggcaatagtgacaaatgtacattatgcggccccggaggggtatgaaacgaaggatatagctgaagtgctggattcatctccggtactgttaccgaaacaatatgagttctggcaatggctggcggaatattatctttgtacattaggagatgtgtacaaggcggctatcccttcgggtatgaaactggaaagcgaaacgttggtggaatataatcccgattttgagaccaccgcaccgttaccggagaaagagcagaaaattctagatttgttgagtcgggatacagaacagtgtgtaacccagttggaaaaaaacagcggactgaaaaatgtgttgactgtcatcaagtctttgttggacaaagaagccatctttgtcaaggaggaactgaaacgtaattacaaaccgcgtactgaggcgagggtgagattggtgaacggagaagcggatgaggcttacttacaacggctgttcaatgaattgtcacgtgctcctaaacaattgatgatattaatgaagtatgtggaattgtccggttgggtaaccaaagggtatgctttaaaggaagtaacaaagaaagagctgcttgaaaagtcaggaggttctgttgccgtttttaacggattggtcgaaaagaaagtctttgaggtctatcatcaggagataggacgtttggataaaggaattttggataccggtgatattaatccgctgaatattgcgcagcaacaggcctatagcaacattcttcaatgcttcagagagaaaaatgtgtgtcttctgcatggtgttacatccagtggcaagacggaaatttatatccacctcattcaggaggtgctgaaaacaggaaagcaagtcttatatttgcttccggaaattgcactgaccactcagataactgagcgtttgaaaagggtgttcggacatcggctgggtatttatcattccaagtttccggacgctgagcgggtggagatatggcagaaacagttgggagagaagagctatgacgtgattctcggagtccgttcctctatttttctgccttttcgtaatttggggctggtcatcatagatgaggaacacgagaatacgtataaacagcaagaccccgccccacgttaccatgcccgtagttcagccatcatgctggcttctatgttcaaggcgaaagtgctgttgggaacggctactcctggtgtggaaacttactttaatgctacctcgggaaagtatggcttggtagaattgaaagaaagatataaagatatcaggcttcctcatatagaactggttgacatcaaggaactggcgcatcaaaagcggatgcaggggcctttctcaccggtgctggtcaagcagataaaagaggcattagagcgtaaggagcaggttatcctgtttcagaaccgtcgcggtttcgctccaatgatagaatgtcatacctgcggctgggttcctaaatgcaagaactgtgatgtgagtctgacgtatcataaggggctgaaccagctgacttgccattactgcggatatacctatcaggttccccgttcctgtccggcatgtggtggagtggaattgatgcatcgtggtttcggtacggaacgtatagaagatgatatcaagttgatatttcctgaagcaaaagttgcccggatggacttggacactactcgtactcgtaccgcatacgagaaaattattgcggattttgaacaagggaagacggatatactgattggtactcagatggtatccaaaggattggactttgatcatgtcagtgtggtggggattctgaatgcggatacgatgttgaacttcccggacttccggagctatgagcgtgctttccaactgatggcccaagtggcaggacgtgccgggcgtaaaaataagcaaggactggtcatccttcagaccaaatcgccggatttgcctgttattcatcaagtgatacataatgattatgaacaattatactacgatcaattggcagaacggcagatgtttaagtatccgccttactatcgtttgatttatgtatatttgaaacatcgcaaagaagacgttctggatctggcggcggataccatggcagcacagctccgttccggattgggcgacagggtattgggcccggacaaaccgccggtggcccgtatccagaccttatttataaagaaaatgattgtgaaagtggagcagaatgcttctataaagaaagtgcgtgattatctgcttgccgtgcaacgtgccatattggaagatgaacgtttccgttcgttgttagtatattatgatgtagatccacagtaactggtccatgcactggatgataatagaaaagataaacgaaaataaagatgaagatagaattagacgtacatacccataccattgccagcgggcatgcattcagtactttacaagaaatggcgcaagctgccgccggtaagggattgaaagttttagggataacggaacattcgcccggtattcccggtacttgccatcctatttattttagaaacttgcatgtggttccccgccggatgtatggggtggagctgttgctgggggctgagattaacattctggatggtaaaggaaacctcgatttggacgaggactatatgaagatgcttgatatccgtattgcaggtatccactctttgtgttatgaatatggaacgatagaagaaaacactcatggaatggtgcaggctatcagtaatccttttattcatattatcagtcacccgggagacggtacggcagcgttgcattttgaaccgatggtattggcagccaaagaacaccatactttattggaaataaataacagttctttaaagcccacccgtaacaagcccgatgcccgtgagaacaacctcaccattctccgtttatgcaagaaatatgaagttccggtcatcttgggaagtgacgcgcatatttcgtttgatatagcccgttacgataatttgtatgaattgttgcagcttaccgggtttcctgaagagctgatcatgaaccgtgatgtgaaatcatttaaagaatatctccatttgtagattatatatgaaaagaatactttttgtctgccttggtaatatttgcaggtcttcttcggcagaagaagtgatgcgtactctcataaagaaagaaggactggaacacgagatagaggtggattctgccggaatcctgagttatcatagaggggaattgcccgacagccgtatgcggatgcatgcttcccgccgcggttacaatctgacccatcgttcccgtcctgtctgtacggaagatttttatcattttgatatgatcatcggtatggacgaccgtaatatagaggacttgatggaacgtgctcccgatctggaaacggaaaagaaaatccatcgcatgacagattattgccgcaccaaggtggcagactatgttcccgacccttactatggcggtgcgcaagggttcgagaacgtgcttgatatattggaagatgcttgtgctggattacttacttctttagttccggataactgatacgagtatgatacatcgttttcagcttttctttaaacagcgctttaactgttgctatatccttgaacgtaatagggcattctttgaaatacccttcagatacctgtgtgtcaataatcttatctaccagtgtgctgatgctttcttccgtgtactccggcaggctgcgtgaagccgcttctacagagtctgccatcatcaggacggcctgttctttggtgaacgggttcggaccggggtagcggaacttttcctggtccacttcttcgtcaggatgttcgtttttatatgaaatgtagaaatacttcgtcagtccccgtccatgatgggtactaatgaagtctttgatcactttgggcagattatgcttctccgccagtttcagtccgtcggtaatatgactgatgataacctgggcgctttgttcataacttaaactcttgtgtgggttgactcccgactggttttctgtgaaaaaagccggattcaccattttaccgatatcatgatataatgctcctgtacgtaccagctggcttttacctccaatcttgtttgccgccgccgcagccaggtttgccatctgcaatgagtgttggaaagtgcccggagctacttcggacatttcccgaagcaagctattgttgatatttgacaattctaccaaagtcacatctgaagtaaaaccgaatattttctccaaaaggaatagtaacggataggcgaacagcagtaaaataccgttgatcataaaatagatgtacatgcgcgtattcagcttggtcaaatcatcttcatgaatcagctcgaaagcaaaatataataaagcgtaactgataaatacaaccaaagccgtccgtaacaattgcgaccgttgggacaattctctcaaactatagatcgccaccattcctgccactacctgtaacaatataaactcatgtggaaaacgtaaagtgatggagcaaagcaaaatgatagtgacatgtgccatgaatgccgttcttgagtcaaggaaaacacggactataatcggaatcatggcaaatggaaccacgtaaatacttgacaagttctgttccaccataatggaagacaggacggggaagaatacaatcagcgcaaatagcaaggtgagtgttccttttcgttcataataatctgcccggaacaactccagataggccatgaagcagaacaggaagattcctacatataatatttgtccggccaatgtcagtcttttctcttgtaccgagtcgctgcgtttttcccattccttgcgtaaggattccaatatattgtaagtttgctcatcaacaatttctccacggtcaataatcttttgtccgttcaacacaaagccgtttgcccatgaaatattagagagcagatctttttgcgcggcttcggacttttcttcatcataaaccagattaggtgtaatgtaatcattcagattacattgttgtaatatcttctttttgtagtgggcggtatccgcattcagcaaatattcataagcttccttcacggtgtacaattggtcgataaaacggcttgttgctacatttttgtctaccaaccgtatggcaatgatgctgtcttcctccatacgcttcaagtcatttccggcaatgattccgtcttcatacagtgcctttaatgtacgttcaatataacgcacatagtccgtgcccggcaatgagtggcgtaaggtcttgttgtaatcctcccttaatttggaaaggacatttttttcggcttccttgtctatttggaaataaggttgatagtctgccaggatgctgtcctgttccttttgtacttgcagatcgtttttgtaaatcggaaaatcaaaagatgcctgtaacagtccgtatttccaaggcttgtttatatcaaattgatagttgaactttccttcattgggcaaaaagtagactattaccgatactgtggcaatgaaaataaggcttttataaatcaaatttttatatgaaaaccgtttgctggtcttgaaacttctcataatcgtatatttttgcgcgcaaaatacgaaaaaatcgggaaatttagattaattttgcagcgtattttatataaaacaacaatgtcagaaagaaaagtaagagttcgttttgctccgagcccgacgggagcgttgcatatcggcggtgtgcgcacagccttgtataactatctgtttgctcgccagcatggtggagatttaattttccgtatagaagataccgactcaaatcgctttgttccgggtgcggaagaatatatcattgagtcgtttaagtggttggggataaactttgatgaaggagtcagctttggtggtaactacggtccctaccgtcagtctgaacgtcgtgatatttataagaaatatgtacaggtgttgcttgacagcgataaggcgtatattgctttcgatactccggcagagttggatgccaaacgtcaggaaatctctaatttccagtacgatgcttctacccgtatgtctatgcgtaactctttgactctgccaaaagaagaagtggatgcactgattgccgatgggaagcaatatgtggtacgtttcaagattgaaccgaatgaagatgtacacgtacatgatattatccgtggcgaggtagtgatcaattcttccattttagatgataaagttttatataaatcggcggatgaactgcctacttatcatttggcaaacattgtggacgaccatttgatggaagtttcccatgtaatccgtggtgaggaatggttgccttccgctccgttgcatgtcctgctgtaccgggctttcggctgggcggataccatgcccgagttcgcacatcttcccttgttgttgaaaccggatggtaacggtaaactgagcaagcgtgatggtgaccgtcttggcttccctgttttcccgttggaatggcacgaccccaaaaccggtgaggtgtcttccggttatcgtgagtcgggttacctgcccgaagctgttatcaatttccttgccctgttgggatggaatccgggcaatgaccaggaactgatgtctttggatgaactggtgaagcttttcgacctgcaccgttgcagcaaagccggagcgaaattcgactttgaaaaaggaaaatggtttaaccatgaatatatattgaagaaaagcaatgaggaagtagccgggcttttcatgccgatcttgaaagagcacggcattgaagctcctatggataaagtagtgaccgtggtaggtttgatgaaagatcgtgtaagttttatcaaggatttgtgggaaacttgcaaattcttcttcgtcgctcctacggaatatgatgagaagacccgtaaaaaacgttggaaagaggactctcccgaacgtatgctggagttggcggacgtgttggaggccttggacgacttctcgctggagaaccaggaagctgtggtcatgaaatggatagaagataaaggttatcacttgggtaatataatgaatgctttccgtttaaccttggtaggtgagggtaaaggcccgcatatgtttgatatttcagccgttttagggaaagaagaaacattgcgacgcattcgtcgggctgtggaagtgctcaagtaatagccggtagttatgatttataacttagtcatctatatttatctattcggggtgaaggttgccggcctgttcagtgccaagcctgccaaaatggtaaaaggacaccgggaggtatttgatatcttgcgtaacaagatagacaaaaacgcccgttacatttggtttcatgcagcttcattgggtgagttcgaacagggacgccctttgatagaacgtatccgtaaggagcatcccgaatataaaatattgcagacattcttttctccctcagggtatgaagtgagaaagaactaccagggggcagaccttgtctgctatctgcctttcgacactccgcgtaatgtccgtcggtttgtagaattggctaatccctgtatggtgttttttatcaagtatgaattttggcagaattacttgaatgagttgcataggagaggtattcccacctatagcgtatcttccattttccgtcccaatcagatttttttccgttggtatgggaagagatatagtgaggtgctgaggacttttgctcatttgtttgtacagaatgaagtttccaaaaaattactggcaacaattggtgtgaccgatgtgacagttgtgggcgatactcgttttgaccgtgtgctggatatctgccatcaagccaagcagcttccgctggtggagaagttcaaaggtggctcgttgacttttgttgcaggcagctcatggggaccggatgaggatatttttatcaaatatttcaatgagcatcctgagatgaaactggttattgctcctcatgtggtgagcgacagtcatttgaaagagattttagataaggtgaaacgtccgtgcatccgctataccgaggctacggaagaaaatgtgacacaggccgattgtttgattatcgactgttacggattgctgtcctccatttaccgatatggtgagatttcgtatattgggggtggtttcggagttggaattcataatgtgctggaagcggctgtatatggtattcctgtggtattcggacctaacaacaagaaatttcgcgaggcgcaacatttgttggagcagaaaggcggttttgaagtgactggctatgatgattttaaacggctgatggacaaatttttgtcggataaggcttgcttgcaacaagcagggaaagctgccggaaattatgtgaaccataatgccggagcattagaaaagataatgaaagatatcactctctgattgtttcaaggtgatttgagtatatgcaggttatagagaagatttggctctataacctgttttttttccttcaaatccttcattgtaaggtaatatattgttactcagttgtttatgatgaaccatttttactttatttccttcatccggatataaatccttcagcctgctgaaatgagggcttatccggcttttgggtcagcagaaatttagtggggatttatttcatacaattgtttgtgatacccccctgtacgagcgttcgtaattttatggatggtttgtatgacaggcaaaagtaaagattgggattggatatatgccctcactttagcatttcgacttgttgctatataacatacatgtagtcagatgtatatcttcctgccaatatgttgtttcgcttttttataagaaggcagtctggggacttttcctccctgcttaaggaatgcgtagctttgtaatcagattcatccttaaaagctcttgtctatatttctaaacctttcccgccgtatggttaaaggttttttttcctgtttgttctatctccgtaagcctttggagttaactccatagccttgggagataactccaaagcttatggagatagctccaaaggctatggagatagaatacatccgtataaaaaggtttaatcaggagatagaaaaggtttatgcaacagggttcgatctattgtcatttccataataattccaaatgcttctggacttttatagtagaactttaaaaaaactggttgatggatttctctttgatgaaacaaaaaaagttaaaatgatgaacttttctccttttaaagctaacataaactctttataagtagcaatattctgtctttcagtttgttatgcttcgcttttacatgacccgatttatatatctcttgataagagatatatattttctgtgcaaaaataagcaaagttttgagaactaatacatttttggcaaaaaaaataggaatttatataaaaaaatagttctctcacttatttatattcttctttattccgtttcaacagctctgtaatatgttgatataatgtgtgttaatgctttttgtagatctcttatcaagagatctacaaaaaatgtcgtttttaagacctttttatatatagaatatatctggtctttgaagcggtataactaaatgaaaacaacataaagcagatggaatatctatttctgagacgtaaacgcacgaccgctacttccgagcggcagaaaactttgcttttcaaggccgccgagcggcaatggaaagaggagtttgccggaaagggaacagacattcgcaaggtggattgcaatatatataaaggtatattgtaccagcttgagatacgtcaggtattccttgacacctcgctttctctgaaaaaactgagtgaactgcttgaaacgaaccagacctacctgagtaatgtagtgaataagtattttggttgcaacttgaaggaacttgtgaacagctatcgcgtggaatatgccaaggaacttcttgattccggtcgttgcacattgaatgacttgccctgtagttgtggtttcgcctctaaaagtgctttctactcggctttcagtcgtattgtgggcatatcacctttatcttatcagtccagggaaaggaggaaacggtatttacaggtgataaactagctaagctattaataatgaagttaatatgtataaccaattttagtttttaaatttataaatttaaagtttttctattatgaacaaaaagtttttaagtgcaatcctgttcggagccttaatggtttcgtcaacaggaacatttgtgtcttgtaaggactatgatgatgacattgaccgcatcgacaaggaattgagcgaagtcaaggaaaccattgcaagtcttgactcggcaattaaggcaggtaaattcgttcagtcatgtaatgaggttaccggtggatatgaactggttttcactgacggttccaaaattactatcaagaatggtactaatggagcagatggtactactgttatccctgaattccgtgtggaaggcaattactggcaggttagcacagacaaaggtgctacttgggtggatgtgaaagataccgaaggtaacaaagttccggccagaggtcaggatggtgaagccgctggttcaaacgtgtcttgggtgacagtggacggtgtggaatacatcaagatcggtgacaaggttaccgatttgaagcagaacaatgaatttcctaacattgctgtagatgctgaaagcaagactgtaattgtgactatcgacggacagaactatactttattgcaggaaggttctgctttcaaagggttgcagactgtagtttacagaaaacaggctgttaatgatgccgatgatgtttgttatgcttataatgtgtataatacagataatgaattgtttgcagctgttcctgcttatgcttctttcaaggtttatccgggtgatttctcattggacaatgctaaattctcgttcgttgatacatacaaattgagtcgtagtgtagaaccggctttggtatatatggatggttcggctactttagcaaacggagtattgaaacttgctatgatacctaatgaaggaataagtgaaggaacagtagttgcaacttctttagatgtaactatgtatggtcaatacacttctgcttctgattactttacagtaggaagaacaaatgttactactgataatatcaagaacgcattcacttccactaccgtaacaggtaacaattatccgaagattattactgaaggatggaatgcttatgatggatatgattttggtaaattcaactatcaaggtacttacaatgtaaatgattctattgatgtttatattcaaagtgctaaggtttgggtaaaagaaacaggtattgtttatgaaaaggctttcagactgttggatcagaatgaagaatacacttttaagggtcaaactattaagactcatcaaggtatctttgaactgaaagataatgtcttgtctgtgaaatcaactaaccaagcttctgctattgatgaatatgcagctattgaagtaactactactgttaaggctcaagaagaaggaattaaagattatgagataaagaatgtagtatttatcaaagcagttcgtcctgctgttaatcctaacttctcaactgttgctttgaaaccgttgaacgctacagacaacttcacatttacttacaatagtgcaaaatctcaagttatcactttggatgttcgtgactttgaaaatgctattgaaggacgtgatgttgtttcaaacaataatagtgtatattctacttttgttcagttgtataaacctgtatatgatacagctaataagttgactcgttatgccgatatgtctcaaacaagttacaataatttctggactataagaaacggattagctaatgccaatttggaagagaacgttaccaatgtggctaactatattgaacagaatttgaatatcactaatgaagctgttctgtactataagaatggtggaaacaatgcagacaaagactctttattcttaatcttgacaccgggcgctaatcaggaacaaataaagaagactactttgttgatgggctcatcttggtcttatgattggaacagtgactatgatatgatgatgaccgatggcatcaagactccttatggtgtttacaacaagtatgtaaacaaactgtttaaggttgccgttaacgacttctctgtaacttatacattcgattgtccgattaaggatcagtataagaaccgcattatcatgggtgaatgggttaagagtggagcaaattacacagacttcattatgcaatctcaggtatttgacgaaatgtatgatgttgttcctgaagatgctatagtgaaatttgatatggcttcaaagaaccagaacgcttatgttcaggaaatgatgaagagtggtgatatcaagtgggctactactaaccagattgtatttactccacgtgtagatttggctaaggttggcaaactgaaagttgatatttacgatattacagcaggtgatactgattctaaacgtgtactcttcgatacagaagaatggactgtgcaaacaccgatcttggcattctctgatgttgttgacttgaagtataacaatcctgcattagcaactggtgaacaaattaatctctttgatttgattaatggcttgaaagttgctgctgacaagaagaaatggacagatttgactttgaaagatgccgttggtaataagttggttgtatatgatggagccaatgatcttgctaaagcagaacctattgcagctacattgtatcagaaggactctgaatctacaggtgttaaagttgatatctctgaagcagacaaggctgaatacagctatgctaacggtatccttacttggaatggcgaacctacaggtactgtttatgagcatgatgttcaattcatcatcacttatactcatgactggggtgttgtaaccaagacattcaaggtaactgtaacaagaaaagtacagtaaacattcgggctaagataggaagtatagtttaaatttgatatgctttcttcttgataacctcaagcgaggaggggatatgaatctgataacagaggaatatcctctccttttttattataaaaatagattcttgatataatgacgaaattagttcgatgcggtataaacttttatgcggatgtggatcatcagaaggcggtaaatgatagggattccttgcagaacactaaattaatggaacattatactcaccttcttggccaattacaatatgaaggagctggtatctggagccgttttaatattatgttcggaataaatgtttctttattcggattggaaaccgtcttgtttaactctgtatgccagacttctgaatacctgacatttattattgcatttggaggattgtcattctcaatatggtctatttacgtaatgcagagattatggagttatcatgagcactggaagaatatgttatgtgaagcggaaaagacttttccggatgagtatgtgaaactttttacaaagattccttctaatttgaaaagagagaaaaaatcttgggagttatggctgaaatcatacactcaacctttttttgccatattgtctcttatttggttgcttattatagtgttaaaccatgctatttatactgatatgctgaataaggaaaatattattcatcacgtgggtgtggtgaaaatacaacagaatgaaaatttaaaaaataatgaagatgaaaaagatgatggattcgactactgcgattattactacaacagataatagagtattgttgcaaaaaagagatgagaatccggatatagagtactccggatgttattctcttgtttctggctaccttgaggaggaggaaacccctctagacggtattatcagagaactgaaggaagaatttgaacacaagaaatcctcaaaggtacattttagttctataacctatctggggtctgagtatagagcagactatgatagatgggaatatattcatcatacttatttgatggacgatgcagcggatatccgtattttggaaggtgaatcttttgtcttgctggatatggatgagtgtttgagattggagaatcttgctcctcatcataaattgtttttattaaagtatcgtgccggattatgtaaaattgacgtgcgtgagcaatcgaaaaaaatgtttgatgaaataactgtcagagatttgataaaagtggaatccgtagggaatgtgaaaaattatagcttgctggaggcggggactggttttgtaattggcgaggatactactttgagtgcttcaattccagcggtggaagccgctaaatatataggattcttgcaattcgtcccaaaggttctcagaggtaatcattatcattttagaaaggtggaatatatgcttattttacaggggcgtatgcaggctacttttcagaaatatgatgatagtgaggctgtaatagaagagatttgggaaaagggggatttggtaaggactttaccggggtgcgtccatacattaacagctttaggagagtcgaatgtgttgactgttgagttttctccacagccttatgttgcgagggatgtgttgatgaatgataaaaaatagcttgagtatgggaaccattgcagtaacgggggctaccggttatttggctgagaaattaatagaacggttgattacccaaggacatactattcatgcgatagccaggaatgaaggaaaactgattgctctgagggagaaatttaaaggcgttcaaatctttccatgccccattgaagattatcttttattgaaaaaggcattgaatggttgtgatgggatatttcatttggctgcgtttaaagatgtcattttggcaaaagaacatcctctgaaagctgttcagactaatattcttggtacgttgaatcttcttaaaataactgttgaggagcagaacataaaatttattctggcaacaagcactgataaagctgttcaagtttcaggaacgtatggggctactaaattgcttatggagaatctttttgaggattttgaacaaataaacggatcgaattgcgcttataggatcgttcgttatggaaatgtattacattctacaggatctgttttggtaaaatggaagtatgcattagaaaataggaaggagcttatattgacagatcctgaagctacccggttttttattacgtgggaacaggcaatagatgttattttttcctgtttaaatgatgctcaaagtgcggaaccgttttatccgcctaatatgaaatcgataagcttaggaattttattggaactcgcaataagaaagtatgctaaaactattcctgacattagagttatcggtttacaaaaaggggaaaataagcacgagtgtatcacggcagacttaagcagtgaatatgctgaaagatggaataatgaggaattattaaaccttatctagaaaaggggaatgaaagatataaattattgttatgatgaggatatgttgctactatgaatggtaaatagttaaatctttcttttaagacggggaattgcagtatattgattacttttatcctgtatcataacttattaaacctcggatagatatgggaacagaaggcatacaggataaatacatcaacccttataccgatttcggcttcaagctgcttttcggcacggcaatgaacaaggaacttttcgaggctgccgagatagctaagttcaatcctaaggaattaggcgagtattgggaaagtttgaagaatttccgcgactggtacagcgtgatgtccacccagctgaaaaaagggcgtgaggaaggtcttaaagagggccttgaaaaaggtcttgagcaaggtcgtaaggaagaatgcttcaagaatgcaaaaaaaatgaaacaggccggtattgcatttgatgtaattgcacaggttaccggtctgtctataggggaaatagcgtctttgtaagtcgtttacagcaccagtccgtccagcatctcgatataaagccttatcgcttcctcaatttccgaaaccatgatatattcatcagccgtgtgtgaacgggaggactttcccggaccgattttgacagacgggaacttcatcaacgcctgatcggacaaagtaggagagccgaaaggtacacgtcctagttttaccgcgcatttcacaaagggatgctcggcactgatatgagatgagttcaagcggaaagaacgagctttcgcctcgctttttagatgggcacttatttctttgaatagttcttcgttagagtaacattcattactgcggatatccacaacgaaagtacaagtatcggggatgacattatgctgcgtgccggcatttatttgtgtcacgctcattttgacaggccccagcagggaagattcctttgggaatttataatcacggaaccactgaatgtcttccagtaccttgtagatagcattcactccttcattgcgtgcggcatgtccggctttgccgtatgcggtaacatccagcaccatcaatcccttttcggcaatagcaggctgcatttctgtcggttcacccactatgcccaaggtgatgggaggtagttggggcaatacgctttctattccgttttttccggaaacttcttcttcacatgaggcaagaaagatcagattgtatgcctgctcggttgtagagagatggcggtacgcctgaaataaggatactacactggcgccggcgtcattacttcccaaaccgtaaatctttccgttttcggctttcggagtgaaaggatgtttccgccatccgtttaccggttttacggtatcgatgtgggaatttagtaaaatagtcggtttgttgaggtcgaacatcggactgatacaccaaatgttgttgcccgaacgaccggtcatgatacctgtttcttcaatatagttctgcagaaagtcagcggcagcttcttcttcccggctcaatgaggggataccgattaacgaattcagcaatgtggttgcttcggaagtgtaatattctatatcaatcatcttgattttaataatttaatgtgttgcaaagatactatttttgcgtggtaaacggtgatgaaaaaagtaggtaattaagttagatatgcaactaaatctttcggctgatttcttctaactctttgactggttgggaaaattaatgcctgtttatagaggataattccaaattaaacgataactttgccgatgaattaaaaataaatctttggaatgagtagttctttcttatctgtcctgatacaacgtcaggcagggaaatatggtgatcgtgtagcgttgcgttaccgcgattataaaacagaaacatggattccggtttcttggaaccagtttgccgcaactgtaaaaacagtttcgaatgcattgatagaattaggtataggcatacaggaaaatatagcagttttttctcaaaataaaccggaatgcctgtatgtggactttggagcttttgggatacgggctgttactgtaccattttatgctaccagttccgaggcgcaggtacattatatggtaggtgatgccgaaatacgttatatttttgtaggtgaacagttgcaatatgatgtggcgttccgggttatgctactgggaagccaactgaaacagattataattttcgacagggaggtaaagcgtgatgagcgggaccagacttccatttattttgatgactttctgaaattgggtgaggcgcatccgcatcaagctgaggtagacaagcgtacttcagagtcgggtaatggtgatcttgccaatattctttataccagtggaacaaccggagacagcaagggggtgatgttgcatcattcttgctatgaggcggccattccggcacatgatgaacgtttccctcaattgggtgatcaggatgtgattatgaatttccttccttttactcatgtgtttgagcgtgcatggacttgctggtgcctttcgatggggtgtactttgtctatcaacttgcgtcctgctgatatccagaaaacaataaaggaaatccgtcctacggctatgtgtagtgttccccgtttttgggagaaagtgtatgccggcgtgcaagaaaaaatcaatgagacaaccggattgaaaaagaagttgatgctggatgctattaaagtgggacgtgaacataatttggattatgtgtacaaagggctgactcctccgcctgtattgcacatgaaatataaattttatgagaaaacgatctatagcttgttgaaaaagactattggcattgaaaacgggcgtttcttccctactgccggtgcggctattccaccggctgtacaggagtttgttttgtcggtgggaattaatatggtagccggttatggattgacggaatctactgcaacggttgcttgtgagaatgataatgaccatgtggttggttcggtggggcgtatcatgccccatgtgcaggtcagaataggggagaataacgaaataatgttacgtggtgaaggaatcactcatggctattataaaaaggaagctgctacgaaggcggcgtttactgaagacggatggttccataccggtgatgcgggttatataaaagatgagcatttgttccttacagagcgtatcaaggacttgtttaaaacttcaaacggaaagtatatcgctcctcaagccattgaagccaaattggtggtagaccgttatatcgatcagatttctattattgccgatgaacgtaaatttgtttctgctttgattattcctgaatataaactggtgaaagagtatgccgcaaaaaaaggtattcgctatgaaagtatggaggaactgttgcagaaaccggaaattatcgatttgtttaaagagcgaattgatacactgcagcagcagtttgcacattatgaacagatcaagaggtttactttgttgccccatcctttcagtatggagcgtggtgagctgaccaatacgttgaaaataaaacgtaatgtgctgaacaagaactatgctgccgaaatagaaaagatgtatgaagaataatgggaaaatgaatagatttccactatctttgcatcctgaaatgcaaaaattctcaagatgataacaatagagcaactgaaagacgtaaaagaacgtactgcggcacttgaaagatatctggacatagaaaataaactggttcaggtggaagaagaacaactgcgtacgcaggcgcccggtttttgggatgatgccaagaaagcagaagcacaaatgaggaaggtcaaagatctgcaaaaatggatcgacggttaccgtgaggtaaagacgatggcagatgaactggaattggcttttgacttttgtaaagacgatttggttaccgaagaagaagtggatgcagcatatcaaaaggctgtcactgcggtggaggcattggaactgaagaatatgcttcgccaggaggctgaccaaatggattgtgtattgaaaattaattgtggtgctggtggtactgaaagtcaggattgggcttccatgctgatgcgtatgtatatgcgttgggcggagaccaatggctataaagtgagcgtggctaatcttcaggatggggatgaggccggaatcaagacggtgacaatgaatattgagggcagtttttcgtatggttatctgaaaggtgagaatggagttcaccgcttggtgcgcgtgtctccttataatgctcaggggaaacggatgacttcttttgcttctgtgtttgtaacgccgttggtggatgatagtattgaagtgacaattgaacctgcccgtatgtcttgggatactttccgttcggggggggctggcggacagaatgtgaacaaggtggagtcaggagtacgtctgcgttatcaatataaagatccatataccggtgaggaagaggaaatcttgattgagaatactgaaacccgtgaccagccgaagaataaggaaaatgcgatgcgccagttgcgctcaattttatatgataaggaattgcagcaccgcatggaagaacaggccaaggtggaggcaggcaagaagaagattgaatggggatcacaaatacgcagttatgtctttgatgaccgtcgtgtgaaggatcatcgtactaattttcaaacttcggatgtgaacggagtgatggatggaaagattgatggctttatcaaggcatacttgatggagttttccggttcggagaattagtaatttcttcgtaatttatttgttttcttctagaaactttgtacttttgggatattcaaaggagatggtttaatcttaaaaatgaaatacttatgggaaagaataagaaagctgcttatagtaagcgggaagaagagaaagcaaataggattgtaaaaggtctgttcatcggattaatcgtattagcccttgttattatggtaggctatgccatgtatggataaaaacagaagaagaagaagaaatagtgaagtcctgctgaggttattctttgcggggcttttttatatattaaaacgctatgggacaagaaatagaacgaaaatttttagtaaaggatgacagttataaactagaggcttatgcgcatagtcatattgtgcaaggttatatctgtagtgctcgtggaagaactgtccgggtgcgtattcgggataataaagggtatcttactatcaaaggggcttccaatgactccggtacaagtcgttatgagtgggagaaggagatcagtttgcaagaggccgaagagttgatgaaactgtgtgagcctggggtgattgataaaatccggtatttggtgaaaagtggagagcatatctttgaagtggatgagttttatggtgagaatgagggcttgactgtagcggaagtggaattgaatagcgaggacgaattgttcaaaaagccccatttcatcgaaaaagaggtaacgggagatattcgttattataattcttttttgatgaagaatccttatactcgctggtagataatatataggcttctttaacgtctgaaaataaactacttgctatcgtttacctacctttgtaacaaacacaaactcattattgatatatgaaacacaacattttatggggcattatcttgcttgtagcaagtttgtcatttacggcgaaggcgcaaaaggttgtccaaggccagttctcagtcaagggaatcttattagattctttgtctaatgaaggggaaccgtattctacaatccgtatttcattgaagaataatcctgcaaagccggtgaaattggctgtgacaggagcggacggcaggtttgacgaacggcttgccgtgccggggacttatctcattcattttacttctgtaggaaagtctcctgtacagaaggaattctcgatatcgaccaatcgtaagaatgttgatttgggtaagattttgatagcagaagcgactgaaatgttgaaaggagtggaggtggtagcgcagaaacctttggtaaaggcagaaatagacaaagtgacgtatagtatagaggatgatccggattctaaaaccaatacgactcttgaaatgctccgtaaagttccgctggtgactgtagatggagaggataaaattcaagtaaacggtagcagtaagtttaaagtgcatgttaatggcaagccgaataacatgatgagcaataatcctaccgaggtattgcggagtatgccggccaattccattaaatctatagaggttatcaccgagcctggggctaaatatgacgcggaaggggtggcgggcatcttgaatattatcactataggagctggaatggaaggatatacggtgacattgaatggtggtgcaagcaatacgcgtgtgtatggtggcggttatggtacggttcagtcgggcaagttcactgttaccggtaattattcttataactaccagggatctcaaaagggatttgaagattcatatcgtgaggatttcacatctcaggaaaataaatttttggagtcgcatcgaagaagcaagagctatggcaattttcaatttggcagtctggaaggaagttatgagattgacactttgaatctgatcagtttttctatgaatctgatgactggcaattttacgaataagaggattggaaatacacatatgactaattatgccggtaatccggtttacggttacggttctttaggaaataatgaatcgggctttggcgaagtggggggcaatatggattatcagcattcgttcaaaaagaaaggggaacttcttactttttcttatcgttttagccattcacccaataacagtgaggcgaatacggattatgaggatacgttgaatgttccttatcttttgcaaaaccaatattttaaaaatgatgccagcacacaagagcatacggctcaattggactataccaatccgataaattcgatacacagcattgaaactggtataaagtatatttttcgtagaagtaaaagtgatggtaaatattatctggccgataaaaccggagaatataagtatgatcaggatatgagcacgcaatatgatcataagcaggatattctggctgcttatttgggctatcagatgaagtacaaaaaactcggtggaaaggcgggaattcgctatgagcatacatttatggatgcggattataaaaataaggatgagaagtttgatgctcagtttgatgatttggttccatccttgatgttctcttaccaattggctcctactcaaagtttgagggcatcttataatatgcgtatcagtcggccgggtatttggtttttgaatccgtttactgacaccagcaaccccactgcgatcagttacggtaatcctgatttggaaagtgaaaaggcccattcgcttagtgttactttcggtagtttctcgcagaaatttaatgtaaatgtcagtgctaattattcttttgtcaataatggtatagagcaatactcttttataaaagatggtgtgatgaattctacctatgataatataggaaaaagtaagaatattaatttgtctttgttcctgaactggaatatgtctcctaaaacccgctttaatatcaatggacggggagcttatgtggattataaaagttcagggcttgatttaaagaatcatggctgggaaggaaatctcttcggaagctttcagcagactctgccttgggacctgcgtctgagtctgaatggagggggtggtactccgcatatctctttgcaaggtaaaagttcctctttctattattatgcgatagggttcagtcgttctttcttgaaggaaaagaggctgactatttctcttaactcgtccaatttatttaataaatatattacttttaagaataatatcaatacttctactttctgctcttctacttctaccagaattccgatgcgttattatggatttaatattagttggcgctttggggagttgaaggctcaggtaaaaaaagcagcgcgaagcattaataatgatgatttgaaaagtggaggaggtaatgctgggaccggtggagggataccggctaattaaaagttaaaacgaaaccacctgttaactgttaatttaggggggtaaaaactgttatttgatagtttataccccctttgttgttagtttttctgtcatgacttttataagaagtcgttaatattgcaacagaaaacaacaacttaaaaatagattaatatgaagacagtcgactttacacagcatttactaagtatacaaaccgaattatttcgctttgcatttaaattgacagctgacagagaagaggctaatgatttgttgcaggaaacttcacttaaagctttggacaacgaagagaagtttactccagatacgaattttaaaggatggatgtacaccatcatgcgtaatatatttataaataattatcgtaaaacagtgcgtgatcagactttcgtcgatcagacggataacttgtttcatttgaatcttccacaggaatcaggattcgattctacagaaggtgcttatgatttgaaagagatacatcgtatcgtgaatgcgttgcctaaagattaccgcgtgccgtttgctatgtatgtatcaggatttaaatatagggaaattgccgagaaactgggacttccgttgggaacagtgaaaagccgtatctttttcactcgtcagaggttgcagaatgatctgaaagatttccgttaagttgactctctatctttattatataactttgacttttatcatcacgccgactgttcgcgaagaatcgtcggcgtttctttttaggatttacgccatataagggggcgaagtaagtaatatcctattaaggcagctagtccaactccaatgctgtttgccagaaaatccagccagtcaccgctgcgggtatctgtgcaataagcttgcatcagttcgatacacccgctcatagctacaggagctatgatgcctccccatattacatgattccaattgacagtcttatgattcctcagatattctatccataaaatgagacagagtcccccatacatgcatatatgcactactttgtctatgtaggggatttcttccatatctgttttgggaggagtgaaaaaggaaagataaaagatgatagctacaatgatcaaggataccggatattttctaaaataatatagcatactttaatttttttgtgattcatcgcaaaagtacgattaattttatacttttgcaggctaattagtgttgatttataataatttgatagttttttatgcaaaaaagcgaaagagtaaatttcggaagtaagattggggctgttctggcggcggcaggttcggctgtaggacttggtaatatatggaggtttccctatgagacgggaaatcatggaggtgcggcatttattttggtatacttggcgtgtgttcttatgttgggaatgcctattatgattgccgaattcacagtaggtcgtcattcaaaagcaagtacgggacgtgcttataaggttttggctcccggaactcattggaagtggttgggatatttgggagttttggccggttttcttattctaggatattattcggtagtggcaggatggactttggagtatatattggaagcgggagttaatggttttgcagataagaagccggaagattttgtggttgctttccagagtttttcgaaggatcctgttcgtccacttatttggctggtcatctttttattggttacccattttgttatagtaaagggagtgaaagatggaatagaaaaatcttcgaaggtgctgatgcctgttttgtttgtactgatagtagttttggtggggtgctcattgtcgcttcccaatgcggaaaaaggtttggagtttctgctgaagcctgatttcagtaaagtgaacggagatgttttcttaggggctatggggcaggcgttcttttccttgagtttgggaatgggatgtctttcaacctatgcttcttattttgggaaagaaaccaaactgggaaatacggctctgagtgtcggtgtgattgatacttttgtggctgtcttggccggattgattatttttccggcggccttttctgtaggtatccagccggatgcgggaccatcattaatttttattacattgcctaatgtttttcagcaagcttttagcggtgtgccgatattagcttatattttctcggtgatgttctatgtcttgttggctttggctgcattgacttctactatttctctacatgaagtggtgacggcttttctgcacgaggaattcaatttaactcgtggccgtgctgctagattggtcaccttcgggtgtattataattggggtcatttcttccttgtcattgggggttatgcagaaatatacgctgtttgataagggattctttgacttgcttgattttgtcactgcaaaaataatgcttcctttgggtggtttgctggtatgtatttttgtaggatggtatttgaaacgttccgtttcttatgaggaattgaccaatggaggaaagctgaaagcaggtcttttcaatctgtatatctttttgttgagatacgtggcacctgtggctatcattttgatttttatcaatgaattagggctaatttagaattgtaatgtggaaagactttttctatttctcgaaaagcgaacgcagagctatactttttttgttgactttgcttttcatatttatgtgtatatgggttctttttccagtaaaggaagagtctttggaacaggatcaagagggaatagaagaaataaaaaactttctggccggagtatatgaaatggaggagaaggaatctctgcaatattcctatgataagcctaagagaatagaggtggtattggctgcctttgatccaaattcagctgattccatcgaatttttgcaatgtggattgcctccttttattgcacatactattttgcaataccggagagccggcggtaaattcaggacagcggatgatttctctcgtgtttatggcttgtcgtccgagaaatttaatatcttaaaaccctatatccagatttcagaggcttttcggcggaaacaggatacattgcactttatcaaaaaggtggagaaagatacgttggcagcttataaatatccggaaggaactttagtcgatttgagtgaagcggacactaccgagttgaaaaagattccgggaataggcagtggcattgcacgcatgattgtggcttaccggaaacgtttgggaggtttttatgacacggttcagttaaaggaagtgaactatgtagatgaggatatgttgaagtggtttaaactcggaaatacaccaattcatcggataaatgccaataaggctgggcttgacaaacttcgctctcatccttatatgaatttttatcaggcaaaggtgattatagaatataggaggaaaaagggaaaattaaaaagtctttcccagttatccttgtatgaggaattcactgagaaagacttggaacgtttgtcgcactatcttgctttcgattaattgttgggataaccagcagcttctgctatttttaccggaatttcggtattgtcgatgcggccttggaatagttgggcgccggctccgatagcgaatacggggacataacctcctgagtgccctccactggtccaacctactagagcgatgtcatccagaattctcttggcctcagctgccaaaggttcgtcttgttgatattcactttgggttaaatctatctctttaccgctaaatgattcatcatatactttcttcagggatgcttcttgcttttcattcagttgaatactatcccaaaatccgaaattatccttcaatgattgcttgataacttcccaaggtacttgattcttgtatttttttcttaattcgtttacaattttggtatatccgctttcacttactttttgtgattttaaagcttgtaggttcaaagtatacggaccttttcctaaaacgattcctccggtttcgtggtcggctgttactacaatcagggtttcatcaggatgttgttcgtagaattcgtaagcaacttttatggcattatccatatccatcacttcgtggaatgcagtagcggcgtcgttgctgtggcaagcccagtctattttacctccttcaaccataaggaaaaacccttttgatagatctttagataggaaattgattccggcacgggtgatttcagttaaagtcatatcgcctttttttcgatcgatagcataggggatagcactattgtctgttgctgtcgcaggttgtaagagaatcagtttatccgatttttttgcttttttctgatagtctttgtagccacgggctatggtatatccggctttgtccactagtgtatacaaactttctgaatttgaaccggcggcttttttgttggtgggatctaaaaagtctgatcctgcatagaaatcgaagttggcatcaatcaaatccagacccacgttgtaatagctgcttctttgtccttggtgtgcgtaaaaagcagccggtgtggcatggtctacgctgacactggtactgatacctacacggcaacctttattttttgcccaagaagcaatactgttaactttggtttccagatcctttttcacacctaatgcgccattttttgttttgtttcccgtagcaagtgctgttcctgcagcggctgaatctgtcactccgttggttgccgagaaagtagtggctatggttgcataaggaaattgggtgaataataacggagtcacaccaattttgccttccaactctccacgatacatctctgttcctaaaacttggttaacacccattccatctccgatgaaataaaatacatactttgcttgctgtgcctgtacaaaaagaatggacaggaatacaaatacggtaataaatgatagttttttcatattaattgagttaatgacatttttctttttttagtctagcaaatatagggaaaaaagactttttatcggtatttcttttttgaataattgagatttaatgaccaaatactttttttgcaataagtttgtaaatgaaatgttcttgaggtgtaatataaaaaatctgtttgggagtagggaaatccgttttttgtactatgtatctgtttgctttcgacatgaatattgcatacagataattgctttaatattagtgattattaattataaatcttatatttgtctaatctagagtcagtaaggtaaagtatgggagaatttataaacgtattagtgtcaaaagggaaaagcaatttgataccggaaaaagacaacctgtatggacagtttgtcggtgaatgggattttgaatgggttgataaccaaggtacaacaggcgaaagacatgttcagggagagtggatattcgcttgggtactggaagggactgcaattcaagatgtgtttatttgtccttcgcgtaaggcgcggattaaagattatcaaccggatgcagcttatgcgactacggtacgtatgtataatcctaatacagaagcatgggatattttatatacggaattaggaggggctacacaactggaaggaaaaagagaaggaaacaggattgttcagacggaaattaatgagaagaatatacagtgggtgttttcggaaattacagcgacctcattccgttggcaacgtatggtaaagtgtccggatgatacttgggaaactgaagctgaactttttgcagttcgtcgatgattaagatttatatgcatattatataagtttgagatattgcagtctaaaatagacttgttgtagtagaagctcagaggtgatttaacgagtttataaaaaaagaatgtgtgaatgataaacaatctcagaaccgttttcttgcatttggcggagaaactgtattcaaactaaatcctgccagctatacgcaggaaaagatgtggggcaggtatatggaatctttgcgtaagaatctttctgcttatactcttgatgatgctcccgaagatgttcgggaactctacaaagatgaattcatccagctttatgcttcaagtataaggtgtttttttaatatgcatcaaattgggatttatatcgggaaggagtagttttgctccaagacttaatcaaatatggaggcaggtcagaagtggagaaagttataattgagctgaaagctcgtatacctcgtcatccagtctatattgccgtattttgtgttttgtgagaaaataaaaaatcctgatttcggaaatcaggattttactgtctttttttcttcaaggtggtgccaccagcaaccgaaaacgggttgttatgacactatctttcagtaagttgtatctttgctacgatgtaagtcccttgaataaggttttcacagctttgcaccgttcaacacaagtttgtatcttgggtacgatttctgaatgcaaagataagtattattatataaaagcaatattttgctcttcataatttgaatacggttatcgttttttcttccaataaggtttagtccaaaaagagtaccctgaattgcgatagcttcgttctggaacagcagcctgtaatattcgatccatatcataagaattgagataattgtcctttttagctatgaaaggatcaagccaatcagctttctctctagcccattgtatctttgctagcagttcatcatcagtttcaccatcttcaattgcatggttctcaaatgcattaatatattctcttaaaatattagtttttcgaaaacgttcagcagagtataataggtctttaaagtcttctagctcttttcttttctcttcttcgaattcttctctttttcgttcttcttctttacgtcgcttttctctctcttctgcttcaatacgttctgtctttctattatctgcttcaatctctaggtatgctactatactaattattttatcttcgattttagtataagccgtatcatgaactagtgttgggctatgaaagctcgaactatgataaatataaaactgtaattcgccagaaaagatattattattgttatcacagcgattactgctattaggattttgcttttttctttcagttaatcttatttgaatttcctcaccatcaacaatggcataggtctgattatctttgcatttaatactatgtcctctaaaaattaagccttttataattgtatcaaaaatagatagtgctctatctagcatattttcagaaacatagaggtctaacgtttctcttattttacttttatagggatttttctttaaatattgattttctgatcgctgtctgaatttttcttttgtgtcgattattagaggatttttagcatataagacttctggaaccttaaagcatgaaatatcaccactgcaaatttccagttcacgttgcttgtatggatttacggatttctccatttctactttaggttctttggcttcttgaagtgttgttgattgagttgcgtttgtttcctcttgttggaacggtagaggtgtgacttgcttaccatatttcagttttgcccaataccccaaaggtggtgtgggtatattcatcgatttacagcgttttcttaaaccattatctgaaagaccaaaacgtttacatatggttgtcattggctcagaccatactaagtcatataattctttgcgtgtcagttccatactgattgagtattagtagtttctctttgatgtatatttttcttgtagagtagcaacacgttccttctcaacccatttaattaattcgtcctcaaagaaataaactttgtttccttgtatataatgaggtatggttcggcttctgaccattttattgatgccatttttagtttgatttagaatttgacatgctttttcaatatttataggtctgtgcttatcaacccctaaacctaattgtgactctatatgttcaagtaagactctcatttcagcaatctcatttataagataatttactgctttaggagtgttttgcaaagtcaactcctctttattgattgtttcatcagtattcatatgccaaacagttatattgattaataatgttatgataatgtagcttactgttgatttataatataatacccccccgttttttgtgcccccctaaactcaattaaacctgatttaactaaagaatttaagtggcgttttgctgttggaatacttttctttattaattctgcaatcttggacgaattgagtccaggatatttctggattatctttaaaacttctttctccttgctatttacagtatcatttacagtatcatttacagtatcatttacagtatcattcttgatactgatacctcttttgaatataaccgtaaacatcccgtccgtatgaaattcaggctcaggaagattggcttctttcatagcttcttgcatacggggaatgccggatgccaccctttcaaccaaatgcatacgggtaaacaatccaaagattaatgggttgcgtgtcatgctcttgtgtccgaaatctttagctacgataggcaaaagccctccgggattagaaacctctacccggtcatcaaacatttctattgtaatggttgctccctgttcgtaataatcacgatgtgagagagcgttaataatggcttctttaaacacagtaagaggaatttcccaaatttcttctcttggtcctgctccctcaattttataagctacttgcagtttactttctagccatgccatagcctgcaaatattgttggtatagtggaccgccaaaggttttatcatcaatgatatatactttggttgttcctttgaaaaggacacatcttgttactgcgtgtggaaactttcgttcaggttgtttcccaaagaacatggctgctccattcttggctactccgttatccgtaaacagttccaaattctcaaatatctgtttgttggcagtcgatggacttagctttgcttccgtgcgaaagtcttttatcgcttgttcatctgcatctgtgtaaatgttgaaccacgaacaagggatagcatcaaaaaatattttgttgcattcctgaaagaaactgcgcatttcttcgacagtacgaagtttctgtgagtttgctccctcacgcataaagatagaaccggaaaatatataaggtttatctttccctgacggaacatcaattacccatactgtcttatcctcgatatttaccgcatacatatcacaatggagagccggagatatttcactgatagagccttgaatggctgaacgtttgtcattttccaaacctgtaccaataatctgtccgttatcatctacgccgataagcaaatatcctccgtcagcattagcgaaagcgcaaatttcctctgttagttcacgaacctttgaaggaacacggactttgaactctacattatagccttctccgctatcgataagtgattgtatggtttctgtatttgtcatagacatctataaatataatgcaaaaatagtcatttctattgttttaataactctaaaaacaaggatatgtatatggtttacttcaaattgttctttctgaaattagaggggctgcatcctctatactttttgaaaaacttattaagatggctctcatcggtaaatcccaattcttcaacgatttcacaaattctcatttgactatgtaataatctattttctactaactttagtttgtagtttaaaatgtattgctgcatagtttcattagtatgttttttgatatatcgtcctaaataattctccgaaatgccaaaatgttggcttatatcttttgctctgattttacctgttttatagatgtttgcttgaatatactgcaatatgtcaagcgatttgtcctcagagcattcatccacctgttcaggcaagaacattgcgatattgcgtgctaccacaataataatcgtattaattatttgtgttataatctccttgctgtataaatttcggttaatatattccctgataatcgcttcaatcatgggtttcaccaatagcttatctactttatttcttagtatacaaccgggttgatgattagcatgttgaagaataaactccagtctttggatattttcagcaccgaaaacagaagaatgtatatatatgtcattaaacttgatgtcgacaaacttagttgttgtatggatttcgaaagaatgcgtatctccgggagtaatcataaacaaatgtccgtcatgataaggaaacatattgttgttaatccattggatgcctgttcctgaaagaatatatactaattcaaaaaaggtatgttcatgctcttttagcaaggattcgtcaagctcgctaaaactaatttcgaatggttgatgtaggttttctcttttcatgccataaatatagccctaaaaaacggattaataccaaaataacgaaaaataatacctaaaattagccgaaaaatcggtataactttgcaatatatttaaaattatagcttatgaaaactgaaatggaaaaatgtttggcaggtgaatggtatgattgccacgacccgttttttatggatttgaaaagtaaagctcattacttgttgatgaaatataattctttgccgtatgaacaaaagactgaaaaatatgccgtactaaaggaaatgtttggaagtataggcgcaaatgtttctgtcggtcattcgtttatatgtgattatggatgcaatatacatatcggtgataatgtcaccgtaaatactggttgtacatttgtcgattgcaataagattaccatagggaacaatgtgctggtagcacctaatgtacaaatctatacggcaactcacccggtagagtttaatgaacgacttgtattgacagaaaccccggatggctgtaagtatgtccgtcaaacttttgccctccctgtcatgatagaggatggctgctggattggcggtggagtaattattttaccgggagtgacaatagggcaaaaatgtgtgattggtgcaggaagtgttgtaaccaaagatattccggcaaatagcttggcggtaggaaatccttgccgggtgatacggaaaatcaatcaaatgtaaggttatgattaaattagtagcctttgacttagacggtacaatcggagatacaattcccatgtgcctcaaagccttaaaaaaggcagtaactccctatgttactcttaatgatgtatccgaaaatgatattttagaaacttttggactaaatgaaaaagggatgataaaaaaacttgttggttataattgggaaaatgctttggatgacttctatgtgatatacgaacaaatgcatataatgtgccctcgtcctttcgacggtataacagaactgattgagaagttaaaaaagaaatctattcttattgctttggttacaggaaaaggagaaaagagctgtgcgataacattacgtcaatttaatatggacacgtgttttgataaagtaaaaactggaaatcctttcaaaaataataaagcagagaattttagggaactgctcgcagattataaattacaaccggatgaaatgatatatataggtgatacagtttcagatattgtgtcttgtagggaagttggaatacgatgtttatctgcttcatggataacttcttgcttagatgcacaaaaattagaagctcacaatgctgggaatgttttttattcaatagcttcacttgaatgctatttaatgggatgacaaatatatgtgcttaataaaaaaacatttagtatttctattgtatgaacaaaatatcagatttgagtttctttcgattattatcggaatgctcacaacgtaaagtttccgtatcagagtttatggaagctattgaggaattggctattcatttggctgatttcagtatcagcgaacaggataatagcgttttattacgctatttttcattcggattacatagacttaaatcgtatcatgtatggtttgagcaagaaaaaaatgccttatttgtatcccattgatgaagcgattgggctactgaacaatgaaatacgccttgtggaatggcgtatcaagtacccggagcaattcaaatcacactttaacaaacaacctttttcccctctttatttggcagacaaaacaaatctgattgatataatggaaattatcagcggtttattcctttccaaacatatcgtctataaaaatgataaacctactttcttgtccgacttgtctaaagttacaggcgcataatctatgtttactgcctttttcattttttctatttcttcgttcattgtaccgagcagggtacgcatttccgtctcttttccgaatacccgtttcaggagaagttttgtcttcagaatgaagaacaggatgttcattgttcctgatccctaagctcgtatacctcgtcatccagtctatattgtcgtatttgcgttttgtgagaaaacaaaaaatcctgattccgtttggaaatcaggattttactgtctttttttcttcaaagtggtgccaccaggaatcgaaccggggacacaaggattttcagtcctttgctctaccaactgagctatggcaccattatttcttgtttgcggttgcaaaggtagtgaaacttttttaaactgcaaactatttctaagaaaaaacactgataaaaacataaaatgcttattatcagtgttgtttaattaaaattatttttcttttagtggattccaaccttgcgctttcagctcaaactcttgtccgtcacgggtaatcagggcacatcccagctccggtttggtgatgtgaccaatcacttttatattctctatagccgaaattcgttcatggtctgttaaaggtacagtaaataacagctcatagtcctcaccaccatttaaagcacatgttgtcacattcatattcagttcttccgccattacagccgtttggaaatcaatgggaattctttcctcgtaaacgcggcagccggtatcgctttgtgagcatatatgcagcagttctgaagaaagaccgtcggaaatatccatcatagcggtgggcttgattcccgcttttgccagtttctcaacgatatccttacgtgcttcgggctttaactgacgttccagaatatattcttttccggaaaaatccggattcgcttctttttctccttggaaaacagccttttcacgctccagaagttgaagtcccatataagctcctcccaagtcaccgctgacacaaatcaagtctgtatcttgtgcgccgttgcgataaaccactttgtccttgtccgcttcacctatgcaagtaatactgatggcgagcccggttacggatgaagttgtatctccacccacaatatctacatggtgtagttcacaagccagttttagcccatcatagaattgttctaaatcttcaatacaaaagcgtttggacagtgcgatagaaactgtgatttgttttggagcaccattcatagcataaatgtccgagaagtttacgatggccgatttatatcccaaatgtttcaatggggtataaaccaaatcaaaatgtaccccttccatcagtaagtctgtggtcaccaatacctctttatctttaaactccaatacggctgcatcgtctcccacgccatattgggtttccggattttttaactcaatatccttcgtcagatgtttaatgaggccgaactcacctaaggtcgctatttctgttctgtttatttcctgcatatccttaaattcgattaatcatttcacgcataatggtagtcatgcgcggttgcgcttcatctgccgctttctgaacctcttcgtgtgaaacttccacaatttttccctccacgcctaggtcggtgataaccgatactccaaacactttgatgccacaatggtttgctacaataacttcaggaacggtagacatacctacggcgtcagctccaagaatgtggaacatcttgtattctgccggagtttcgaaggtaggtccctgtgtaccgatatatactccttgttgtactttgatacctttttctttagcgatctccagtgctttgtctatcagttctttggagtaggcttcactcatatccgggaaacgggggccgtattcaatgttcttgccgtgcaacggatgttcgggaaaaaagttgatatgatctctgataatcatcaggtcaccaatttcaaagtctgcattcgtacctccagctgcattggatacgaacaatgttttgatacctaattcacgcatcacccgtacagggaaggtaacttctttcatggagtatccttcatagaagtggaaacgtccttgcatggccatgatgtctttattacccaatttgccgaaaatcaatttaccgctatgtccctctacggttgaaacagggaaattagggatatctttgtaattgatctcgtatttatcggtaatttcgtgtactaggcttcctaagccggtacctaatatgatagcagtttcgggactggtatgcatcttttctctaagaaaatctgctgtttcttgaattttttctaacatagttggttatatttgaattaaacagttcttgttggtcttgtaagaagattacctcaatgggcagcatatatatataaggttttagtgtcttgtccatcagtggatgggctgctaatcgtactgagtctttttcagtggtgataatcatgcgtttaccttccggaagtttcatgaaacgtttctttatcagttccatatctcttgctgtaaagttatggtggtcactgaaagccagtgactcaatgtgctcattgtatggtgataaatcttgaatgagttttgctggtgaggctatgcctgtcaccaataggatatgcttatctttttctatctcttttaatggaactgcattccctactgtaaacaacggatgcagcttgccgtatgctaatgtcgtgaagtagagctgctgataggggtaaagttccatttgcttgctcaagactctcaaatccatcggggtgatgtccttagggcatttagtgacaatgacaatatgtgcccggctttttccattttcaggttcgcgcattcgtccggcaggcagcaaggcgtcttcgcaaatcagtcgatggtaatctactaataagatgttcattccgggttttacatatcggtgctggaaagcatcatccaaaataatcacttctgttccgggggcaatgtgactattgcataactgctctatgccatgacaacggtttcggtctactgccatatagatgtccggaaacttctgtttcatttggaaaggttcgtcacctatcatctgtacggacgtatccggcccagcaagtacaaaacctttggatttgcgtttgtagccgcggctcagtacggccactttgtaatctttctgcaataatcttatcaagtattctgtatggggggtctttccggttccgcccacggtgatgttgcctaccgagatgattgggacatcaaacttacgttctttgtatattccccagtcaaacaatttattacgcagccatacgccggtcccataaagccatgaaaccggatatagccacttgtttatcttgataagattaccttccatgcgcaaattattggatattagggtcaaacggcatacgtgcctgtatgcagttggcgttttttatgttctccagcgccttgaagctgttataatagcttcccaaatattctttgatttcgctgtttacataatgttttttctgattgcccagcaaacttgcgaaaatattttctttttcgggatagccgataatactataattttctatgccggcttgggtggcggcggcatttaatgccttgtctatacctcccagttcatctaccaaaccgagatctttggccatagcaccggtccatacacggccttcagctactttttcaatagcctctgtagacatttttctaccttcggcgcaacggtttacgaatagcttgtatcctcggttgacataattctgcatcaattcttgttctgatgcgtttaatggacgggtaagaataggacctaggctggcacccagatctgccattttattagttttcactacatcaaaattcaatcctaaagtttcagtaaacagtttctcacctgaatacatcatgccgaatatgccgatagaaccagtcagcgtagtcgggtcagcgaaaatgcggtctgcagcgcaggaaatgtaatagcctcctgatgcagcataatctcccatagaaacgattaccggttttttctctttcagtcttactacttcacgccatatttgatctgaaccgtatgcgctgccacccggtgagttgacgcgtaatacaacagcttttacatcatcgttatcacgtaatttgcgcaggcctttacacatcttttgtacatcaatacaatcttctgtggaactgccgggagcatccagaatctcaccgtatgcataatatacggctattacatttccacttttgtctttgggcacatttttcttgacgtttatcatatcttctatgaaaagactgttcagcttgtcgtcttcgtcacgaccgcttaattgtttcagataggaaataacttcatctttatacatcaaggtgtctgctagtccgcattgaacatattcttctgcctgacaaaaatccatatatcggtctgcataagcattcagagtatctgtcgggatgtgtcgtgaatcggatacatctgcctgaatacgattccagacagattccagacattcggtcatctgttcgcggttggccggactcatttctgtagcgataaacggttccacggctgatttgtaagtacccactctgaatacttgtatttccagtcctagtttggaaaccagatttttgaagaaaacaggttgcatgcctgctccgtgccatccgatacttccttgcggattgataattattttatcggccacgctggaaagataatacatcttctgtgcatattggtctgcataagcaacgatgaatttaccgctttctttgaaatccagtaatgcattgcgtatttcctctaaggaagcgtatgatgcttccagataagaaggttggatataaatacccttgattttgtcattgtcttttgctttcttgatagaagctagaatgtcatccaaaccgtatgcctcaaattcttcccccaaaagttgttggagtgggttttcctgtacgcgttcggatagactgcctttaaagtcgagtacgaagatagagttgtctttcaccaccgtttcagtatccgatgatgcgactatgccaaccagagtgataatccctagtatagtgaacactacgcctgccagaatgacgccgataacgctggcaaacgtaaattttagaaaatctttcattgaatgtgttgtttttaatgttaataattagctaacaaaaataggttattgcattgaaaaaagcaaaaaaagtgaacatcttttgctgcctgtttgttcttcatttataataacctataaatacgttgtattatatgacaaaaagttttaaagaggctctgaaagcccgtcgtacattttatcagatcgaaaacaaatcgacattgtctgataaagaaataagagatttaattcgttttgctgtagaatttgtcccctcagctttcaattctcaaaccacccgtgttgcgttattaacaggtaaggcgcatgaaaagttgtggaacattgtaaaaaatgtcttgcgtgagcgggttccggctgaggtatttggcaagaccgaagaaaagattgatggctgttttgcttgtggatatggtactattctatattttgaagatatggctatcgttcgctctttgcaggaaagtttccccacttataaagataatttccctatctgggcagagcagaccgatgctatgcatcagttggcagtctggaccatgctggaagatgcaggaatgggggcgtctttgcaacattataatccgctgattgatgatgaagtacgtaaagcttggaatttgcctggtgattggaaattggtagcgcagatgccattcggtgtgcctgttgcacaaccgggctctaaggaagtgatgtcattggatgagcgtgtttttgaatttactgattaaaattcatgtctcatcttttggcttattaggggaaaataagcatctttgtgtgcaataaaataaagatgtgctatgaaaaaattattatcccttccccctaatctggtggaatgttttcatgatatagagaaagcagaccggacagagtggttttgtacttccgatcctataggcagtaagctgggatcaggtggggggaccgcatggctgttggaggcttgtcatcagaaagtgactcctgacagcgattttcttacttggttgggaaaagaaaaacgtattttacttcatgcaggcgggcagagtcgtcgtttgcccggatatgcgccatccggcaaaattcttacccccattcctgtattccggtgggccagaggacaacggctgtcacaaaatctgctttccctccagctccctttatatgaacaaatcatggagaaagctccgtcttctcttcatacattgattgcaagtggggatgtttatatccgtgcgggccaaccgcttcagactattcctgatgcggatgtggtgtgttacggtttatgggtagatcctaatctggcaaagaaccatggtgtttttgtttcttcacgagtcactcccgataagcttgatttcatgcttcaaaaaccttcggtggaggaattggggaaattaatgcaaacccatctttttctgatggatatcggaatttggctgttaagtgaccgtgcggttagtctgttggtaaaacgatcttataaggaaggaaaactctcttattatgacatgtattctgatttcggacttacattgggagagcatccgcgtatgatggacgatgagcttaacaagctgagtgtggctattctgccgttgcctggaggggagttttatcattacggaaccagtcgtgaacttatttcttctacattggctgtacaaaatctggtaaacgaccagcgggagattatgcacaagaaggtaaaaccgcatccggccatgtttgttcagaatgctgaggtaggttatcaacttacctcacaaaattcggaaatatggatagagaacagttgtgtaggagcaggatggaatatccatcaccagactatcataacaggtgttcccgttaataattggaacttggaggttccgtctggtgtgtgtattgatgtggttccttttggagaatcgggctatgtagcgcgtccatacggcttcaatgatactttcaagggatctttggccaaggaagaaacatattatcaaggaatgtctgtaggtgagtggtgtgctgtgcgcggcatttcggtggaagaaatagaaaacggtcacgacttgcaggccgcgcgtttgtttccggtttgctcatctgtagaggaattgggagcagttatgcgctggatggtttctgaaccggtattacagcaaggaaaagaaatatggcaacgctgtcgtaaattgtctgctgatgatatatccgcttattctaatctttaccgtctggcagaacagcgtgaagctttccggataaagaattggccggcattggcgcacaattatgaacgaagtgtcttttatcagctcaatttggagaatgctgccggagaatttgcccggtatgacctgtcgttgcctgagcctttatcagaatcggctccgttgatgacacgtatcagtgacaatatgttccgtgcccgggtgcagcagcttaaggggctggcttatcgggaatatgaaaatgaggcttttcgtttgatgcgcgacggacttactgcttcggctttagccaagaggcagcaaccgcatttgtcagtgtactctgatcagattgtctgggggcgcagtccggtccgtattgatctggccggcgggtggacggatactccaccttattgcttgaatgaaggggggaatgtggtgaatattgctattgagttgaacgggcagcctcctttacaagtttacgtgaaaccttgtcgggaatataaaataatccttcgttctatagacttaggcgctatggaagtggttacaacttatggggaggtaaggggtttcatgcaagtgggctccccattctctatacctaaagcggcattggtgctggcaggtttccagccgggcttttccaccgaatcgtatgtttcactggaagagcagttgaaggcgtttggttccggaatggaaattactctgctttctgcgattcctgcgggctccggtctgggtacaagttctattcttgcatcgactgtgctgggggcaatctctgatttttgcgggctgaactgggataagaacgagatatgtaaccgtacgcttattctggaacagctgctgactaccggcggggggtggcaagatcaatacggaggtgtgcttcgtggtgtgaaattattgcagacccatgcaggtatggatcagagtccattagtgcgctggttgcccgattatttgtttacaggtggcgaatatcagaagtgccatttgctttattacacgggaattacccgtacagccaaaggaattttagctgaaatcgtgcgtagcatgttcctcaactccacagagcatttgtctatacttggcggtatgaaggggcatgctcttgacttgtacgaagccattcagcgtgggaatttcgatgaaatggggcgtttggttggtaaaagctggaagctgaaccaagcgttggatcccggcactaatcccgaggcagttgaggctatcattcgccggattgatgattattgcctgggatataaattgccaggtgcggggggaggaggctatctttatatggtggctaaagatcctgaggctgctatacgtattcgaagtattcttgctcagaacccacccaacagttgtgcccgtttcgttgatatggctttgtccgacaaaggcttgcaaattagccgaagctagttataactgaatagagttgggaaaccagccgggtgatattttctttagcaaactccggttccattgccttctccagggtgatggggccgggggctatagagaatatacctttgaatcccgctttgtttaattccggcaggttttctatactgcctgccagtacaataacggggatatgttctttttgtgcttcctttagtatcctgtatggaacttttcccatagctgtctgtcggtctgcttttccctcgcccgtaataatgaggtctgctccttttattttctcggagaagtcgatggctttcaataataattctgttcccggttttagctctgcgttaaaaaaagccagcagtccgccacccatgcctctggctgcacctgcaccggggtagttcgtgatatcttttcctgtcgttttctttataacttcggctaatgattgcatgccttcatccagcctttgcaccattttaggatcggttcctttttgttgtgaaagatatatgccgctccgtcaggaccgtaaaaagggttggttacatcacatgctaccacgaagtgtgtttcttttagtgcggggtgaataccggatgtgtctatgctgctttttccttcctaaagtttttcaagagtggtagcattggcatctgtttttgctaactcagttgtgtgtgctgcgtacatcgtcctgtgttttccgtagctgtcttcccttccctgtcctggcttacggtgtttggttgcccctccggactcgcgctttccccttctttttttcctttttccgtttttgtttacgcgcgtgcgaatattataatgtgtctgtctttttcctcccgtgtcctccgttataaaaaccttctttgtaagacatctgtgattcagcgtattacaaaaaagtttcagggaatccggataatttgtcttgtgaaagtttgcctgttagcgttaaaaggtctacttttgcacccgcaatcgagagagatgcggcacttcagacagtgttactgacttggtgaaacaaacgtgggagatttccttgatagtgatctgcacctggtatcttaccttagcggggctaagggagcgagaacggataagaccccgggaggatggatggtccgccttttatggaagtttcgaaaaaaaactttttcaaaaaaactttcgaaaacatttggtggttacgataaaatctcttacctttgcatccgctttcggaaacgatggcaaacaggaataagagttctttgaaagatttaagataaacaaacaagtagtacaagccggtgcaccgtatatataatatggtgtacggaaaaacaagaaccgtcaatatttttattgtattgatagatttggagtccttgagcgtaaagtcaacttaagtgttgaaaagaatatttttacaatgaagagtttgatcctggctcaggatgaacgctagctacaggcttaacacatgcaagtcgaggggcagcatggtcttagcttgctaaggctgatggcgaccggcgcacgggtgagtaacacgtatccaacctgccgtctactcttggccagccttctgaaaggaagattaatccaggatgggatcatgagttcacatgtccgcatgattaaaggtattttccggtagacgatggggatgcgttccattagatagtaggcggggtaacggcccacctagtcaacgatggataggggttctgagaggaaggtcccccacattggaactgagacacggtccaaactcctacgggaggcagcagtgaggaatattggtcaatgggcgatggcctgaaccagccaagtagcgtgaaggatgactgccctatgggttgtaaacttcttttataaaggaataaagtcgggtatgcatacccgtttgcatgtactttatgaataaggatcggctaactccgtgccagcagccgcggtaatacggaggatccgagcgttatccggatttattgggtttaaagggagcgtagatggatgtttaagtcagttgtgaaagtttgcggctcaaccgtaaaattgcagttgatactggatgtcttgagtgcagttgaggcaggcggaattcgtggtgtagcggtgaaatgcttagatatcacgaagaactccgattgcgaaggcagcctgctaagctgcaactgacattgaggctcgaaagtgtgggtatcaaacaggattagataccctggtagtccacacggtaaacgatgaatactcgctgtttgcgatatacggcaagcggccaagcgaaagcgttaagtattccacctggggagtacgccggcaacggtgaaactcaaaggaattgacgggggcccgcacaagcggaggaacatgtggtttaattcgatgatacgcgaggaaccttacccgggcttaaattgcactcgaatgatccggaaacggttcagctagcaatagcgagtgtgaaggtgctgcatggttgtcgtcagctcgtgccgtgaggtgtcggcttaagtgccataacgagcgcaacccttgttgtcagttactaacaggtgatgctgaggactctgacaagactgccatcgtaagatgtgaggaaggtggggatgacgtcaaatcagcacggcccttacgtccggggctacacacgtgttacaatggggggtacagagggccgctaccacgcgagtggatgccaatccctaaaacccctctcagttcggactggagtctgcaacccgactccacgaagctggattcgctagtaatcgcgcatcagccacggcgcggtgaatacgttcccgggccttgtacacaccgcccgtcaagccatgggagccgggggtacctgaagtgcgtaaccgcgaggatcgccctagggtaaaactggtgactggggctaagtcgtaacaaggtagccgtaccggaaggtgcggctggaacacctcctttctggagaggatccaaagtaaaggtttttgtttttgtactgctgttgttgtttattcaagatatgattccgtattaagacggaagcgagaaagtaagaagccgggtctaatgaaacagactaggttgaacttagtcctatagctcagttggttagagcgctacactgataatgtagaggtcggcagttcaactctgcctgggactacgaatcttgagattcgggggattagctcagctggctagagcatctgccttgcacgcagagggtcaacggttcgaatccgttattctccactccatcagaaacgtaagatacgaagatgaccgatctatgacatattgtacaagcaaacagtaattttagtagtaaagagctgaaagtatatatcatcccgctggcacgcaagtgtgggcgaatgaataaggaaagtaaagaagggcgcatggcggatgccttggctctcggaggcgatgaaggacgtgataagctgcgataagctccggggaggtgcaaataacctttgatccggggatttccgaatgggacaacccggcgtgttgaagacacgccacctgatcatttcaggagctaacgcagggaactgaaacatcttagtacctgcaggaaaagaaaataacaatgattcccccagtagtggcgagcgaacggggaatagcccaaaccgttcatgttacggcatgatcggggttgtaggactacgtcgttgcatgaagacatcggagaagaactttctggaaaggaagaccatagagcatgacagttgcgtattcgtatgttgtcgaagcatagtagtatcctgagtagcgcggagcacgaggaattctgcgtgaatctgccgggaccatccggtaaggctaaatactcccgagagaccgatagcgaaccagtaccgtgagggaaaggtgaaaagcacttcgaacagaagagtgaaatagttcctgaaaccgtgcgcctacaagcggtcggagctgcttaaagcagtgacggcgtgccttttgcataatgaacctacgagttgcctttgccggcaaggttaagtgtgacgacacacgtatccgaagcgaaagcgagtctgaagagggcgtatagtcggcagtggcagacgcgaaaccaagtgatctacccttggccaggttgaaggctgggtaacaccagctggaggaccgcaccaataagcgttgaaaagcttctggatgagctgagggtaggggtgaaaggctaatcaaacttggagatagctcgtactccccgaaatgcatttaggtgcagccttgtgggttactgatgtgaggtagagcgactgataagatgcgagggcttcaccgcctatcaagtcttgacaaactccgaatgcgcatcagttttacctcaggagtgagggcatgggtgctaaggtccgtgcccgagaggagaagaatccggaccacctgctaaggtcccgaaatgacagctaagttaaactaacgaagtctgactgctaagacagctaggatgttggcttggaagcagccattcatttaaagagtgcgtaacagctcactagtcgaggagtctggcgtggataataatcgggtattaagttgtctaccgaagcagtgggatcattgaaatgatcggtaggggagcattccagtcagcgtcgaaggcgtaccgcgaggtattctggagcgtctggaaaagcaaatgtaggtataagtaacgataaagggggcgggaaaccccctcgccgaaagactaaggtttcctgatcaacgctaatcggatcagggtaagtcgggtcctaaggctcagccgaagggcgatgccgatggcagaaacggttaatattccgttactacctccaggagtgatgtggagacgcagtagtgacaatgccgccatctgacggaatagatggttgaagggtgtagatgttgatcttggcaggcaaatccaccatgagaatcgaacctgatagtatgccgcgtccctcgggacaaggcaatagtgcatgtaatcatgctgccaagaaaatccgctaaactaaatcctgtaggtacccgtaccgtaaacggacacacgtagtcgggatgaatattctaaggcgcttgagtgattcacggttaaggaactaggcaaactgaccctgtaacttcgggataaagggtccctacccggtgacgggagggcgcagagaataggtccaggcaactgtttaacaaaaacacagggctgtgctaaatcgaaagatcctgtatacagcctgacacctgcccggtgctggaaggttaagaggagacgtcatcgttgagagaagcgttgaattgaagccccagtaaacggcggccgtaactataacggtcctaaggtagcgaaattccttgtcgggtaagttccgacctgcacgaatggtgtaatgatctggacgctgtctcaaccgtgagctcagtgaaattgtagtatcggtgaagatgccgattacccgcgatgggacgaaaagaccccgtgaacctttactatagcttatcattgaatctgggcacgtgatgtgtaggataggtcggaggctttgaagggggtacgccagtatccttggagccgctgttgaaatacgacccttcatttgtttggattctaacccgtgtatatggggacactgattggtgggtagtttgactggggtggtcgcctccaaaagcgtaacggaggcttctaaaggtgccctcacggcgattggtaaccgccgttagagtgtaatggcataagggcgcttgactgggagactgacaagtcgatcaggtaggaaactagagcatagtgatccggtgtttccgtatggaagggacatcgctcaaaggataaaaggtactccggggataacaggctgatccctcccaagagctcatatcgacggagtggtttggcacctcgatgtcggctcgtcacatcctggggctggagaaggtcccaagggttgggctgttcgcccattaaagtggcacgcgagctgggttcagaacgtcgtgagacagttcggtctctatctatcgtgggcgtatgaaatttgcgtggctctgacactagtacgagaggaccgtgttggacagacctctggtttaccggttgtgccgccaggtgcattgccgggtatctaagtctggatcggataagtgctgaaagcatctaagtacgaagccggccacaagattagatttctcagggtcgttgtagactacgacgttgataggatgcaggtgtaaagatggagacatcaaagccgagcattactaattgcccgtccactttccttatattttggatggtgtatacgttcggttattactacaggataagataacgctgatggcttgtcgatatgtcgctcttattcaggtggctatagcacaagggttccacctcttcccattccgaacagagaagttaagccttgtcacgccgatggtactgcgtcacagtgggagagtaggtagctgccgtttttgattgaagcctccggacttgaagaagttccggaggctttttttttgcatccacgtgtggctccggacactcatgccttggaaaaaggcgggaaatagaacaggcaggtctgaaggcccgcctaacagagaaacggaagatgattatagcgcctttatgcaagctatcagtttgtctacatcttcttcttctgtatcgaaagaggattatacatgtatatataatatatacttatgataataaaacaggtgaaattttggagcataaataccctattaataggctttgcaatgattctatcattgagcatatttaactaaagaatgagcattataatttggaattagaaaaggagttaaaaaaggaaatttatttcgtaatctttttatgattatcgaatatatttactatatttgctacgtgaattttgaataattcatgagagaaaacttataaaataaaacttcagtataaaaacacttgagtaatttttaggtctgtgtgaacaaataaaacaatagaattgtttcaataatataaaccgagaatcttgcgaaatcagtagtcaatgaagcttattgtcaaaataggattaatcgccctgcttgtaatgctgaactatcagggagtcgatgcggatgttgtatcttccgccattgacaggtatgctactactacggaatctcaagagaatacgccgtctgaccatggtacattggaaaccatgtctttcactacttctttgctgacaggacaacagcaggtattaactaaattagtgcctgacgatcttcgtatccgtagagcagaggaacttcaacagaacttcttaaaaattctcataggacgtttttcactacgggaggaattattggctattgaccgcgccaaaatctttccgtctaatcccattcattgtgtgtctccggcatgtcattattttgtgttcacgctgagacgcatcttgatttaattaatcgttataaatttagttgtttaacctcctccgacgccctgcagagtgtcggggttggtctcgaattatctttttttaaactataacgattaattaaaatatatcatggaagctattcaaaataaaactactaataagattgtaggtattaaaaatgcaggttgggtaattatatgctgctttatcattgcaatttgtatatataactttttactgggaaatccagctaattttatgaacaatgaccctaataatcatccgttgccgggtaatttcctgggaactatttataaagggggtattgtggttcctattattcaaaccttgttgctcactgtcatagcattgagtattgaacgttattttgctatccgttcggcttttggtaaaggctcgctggtgaaatttgtcgctaatatcaaatcggctttggctaccggagatatgaagaaagcacaggaactttgcgataaacaaggtggctctgtcgctaatgttgttacctctactttgaaaaagtatgctgaagttgaaaacgatgagactctatccaaagaccagaaagtcttggccattcaaaaagaattggaagaagctactgcactggaacttcctatgatggagcagaatttaccaattatcggtactattactacactgggtaccctgatgggattgcttggtacggtaatcggtatgattcgttcatttgcagctttgtctgctggtggtggtacagactcaatggcattatcgcaaggtatttccgaagcgttgatcaatacagcatttggtatcttgacaggtgcattggcggttattgcttataactactacactaataagattgataaattgacttacagcctcgatgaagtaggtttctctattgtacagacctttgcggcttctcataaataatcgtgccacccctttaaaatgaactactatgggtagagcaaagattaaaaagaaaagtacgttcatagatatgacagctatgagtgacgttactgtattgttgcttaccttctttatgttgacttcaacatttgtgaagaaggaaccggtgcaggtgtttactccggcctccgtttcagaaatcaagattccggaaacgaatatccttcagattttggtggatccgcaagggaaaatatttatgagcctcgacaaacagcccgatatgaaggctgtattggagaagatgggtgaggagtacggagttgactttactcctgagcaggaaaagaaatttgtgacagcttctacgtttggtgttccgatgagaagcatgcagaaatttttggatttacctactgaacagcaggataaactgttgaaaaatgaaggtattccctgtgacagcacagataatcagtttaaatcgtgggtacgtaatgctcgtcaggtgaatcctgatttacgcattgctatcaaagctgatgcgtcaactccctacgctgtgattaaaaatgtaatgagctcacttcaggatctcagagagaatcggtacaatctgattacttctctgaagactacttctgataaataaaactgaataattatgagtgctgaagtacaagaaagcggcaaaaaaggaaaaggatccaagcaaaagaaaatgactgtccgcgtagattttacacctatggtggatatgaatatgttgctgattactttttttatgctgtgtaccacgttgagcaaacctcagacgatggaaataagtatgccgagcaatgacaagaatatcactgaagaacaacagagtaaggtgaaggcttcacaggcaataactttgctactggcaggaggagataaattgtattactatgaaggagaacctaactataaagactatacttcgctgaaggaaacttcgtataatgcggatggtctgcgttccattcttcttaaaaagaactcggtggcagttcgtgaggtaaacgaactgaaaaaacagaaagctgatttaaagatatcagaggaagattacacgaagaaactttctgaaataaaaagcggaaaggatacgccgactgtcatcataaaggcgacggatgattcttcatataaaaatctgattgatgctctggatgaaatgcaaatatgcaatataggtaagtatgtgataacagatatcgttgatgcggatcagttcttgatcaagaattatgatacgaaaggtgatctgagtagagatatcgtggaatagtaacacacttttaaaaggaggaaaagaaaatggcaaaaatagatttgacctcacccgaatggtgtgaactggtattccaaggtaagaataaggcatacggtgcctataagatgcgggccaattcaccgaaacgtcacacgtgggcgatggtgattgtagtgataattgctgccgtaggattcagcataccgacattggtaaaactggctactccgaagcagaaagaggtaatgacggaagtgactacattgtcacaactggaagaacctgaagtaaaacaggaagagttcaagaaagtggaaccggtggctccccctcccgctctgaaaagctctatcaaatttacggctcctgttatcaaaaaagatgaggaagtgcgtgatgatgaagagataaagagtcaggaagaattgactcagactaaggtagctatctccattgccgatgtgaaaggtaatgacgaattgaacggtaaggatattgctgaactgaaagaagtgataactaaagctcccgaagcagaagaaaaaccatatactatggtagaacagatgcctcagtttccaggtggtgatagagaattgctgtcttttatagcaaagaatctgcgttatcctaccattgcgcaagaaaatggaatacagggtaaagtgtttgtccgttttgtagtttcggctacaggagatgtgaaggatgtaaaggtgatgcgttcattggacccgtactgtgacaaggaagcaatccgtgtaatccagtcattgccgaagtggattccgggaaaacagaacggacgtaatgttcccgtgtactataccgttcctataacttttaagctacaataatatctatatatgatgaagctgtatattgcattgtcggttgttttgctgctgttgttttcgggctgtggcaacaaacccaaaccaggggaagacgatacgttgacttcgggcacaattacgatagctgtggacgagacattccgtcccattgcggaagaagaattgcaggtattccatgcattaacgccggatgctaccgtgcatccagtttattgcagtgaagtgaaagccatgaaacttttgttggcggacagtgtacgtttggctataaccacgaggcaactgactcgacaggaaatggcatttttcaatgacaagaaattctttcctgtatctgtaaagatggcaacggatggtttagctttgatagtaaacaagcaaaatgcagattcattaattacagttgaacaatttaaggagatactgacgggaaaaattactgactggaaacagttgaatcctgattcccgtctaggtgcgcttcaactggtatttgataatcccaattcgagtactgtacattatgtactcgactcgatctgcggtggtaagcctctatcggaagatttgaaggcacaaaaaacaaatccggaggtgatttcgtatgtggctaaaacccccgcagctttaggggttatcggtgtcaactggataggtaatcctgcggatagtacgcgactctcttttaatgacgccattcggataatggctgtcagtcgtgcggattcggctacagtggaaaatagtttcaggccttatcaagcttatctggctttaaatcagtatccattaacccgcagtgtgtacattttacttaatgatcctaaaagtggcttgcctagtggtctgacttcatttctgacagacttccgggggcaacgtatcattctgaagtcaggattggtgcctgcaacagctcctgtgcggattgtagatgtaaaagaggaatataaatgaacaaaaaagaagaaccatgaagaaattagtattaatcgtgatgagcttgtgcctggctgtaaccatgtggggacagaaatcgccgggtagtgaatggtcgctacaggtgaagcaggctgccacgatgataaaggaggatccagcaaaagcttctgaggcttttgatgaattattgaaaggtaagaataagaagaatgcctttttgttggtagagataggccgggcttatctagatcaagggaaaacggcagaagctgccgaatatgcgcaacgcgctaaagatataaacagtaaatgtgctgtggcttatctactgagtggtgatatagcattgaatttgaatgatgtgaataaagctagcagcgattacaatcaggctatttatttggatgaggactgtagtgaagcttattttaaatatgcacaggtatataaaggcgtagaccctcaactgtcattggatatgttgatgcgcttacagtccaaaactccggaggataatcgcatcagtaaggaactggcggatgtatattatactatggggcaatatggtaaggcaaaagaagcatacgaaaattatctgaaagtaggtactcccactgagcaggactatacccgctatgccatgctgttatatctgaataaagattatgcacagtctttggatatggtgaagaaaggtttggaacttgcaccagaaaatcatgtgctaaaacgtctggcaatgtatgattatttagaattaaaagactataagacaggattggaagctgctgctacattcttcgctaatcccggtaatccggattatgtatacttggactatgtttatttcgctcgtttactggaagcggacaagcaatacgaagaagcagtggtacaatttaacaaagcattgtctatggataagtcccatacggaaatttataaagatatctctgatgtgtacgagaagaaacgtgattttccgaaagcgatagaagcttataagaattatctggatgaaatgaaaagctccccggatattagtgatctctttttatatggtcgtttgaactattatgctgctaccgattcggcttatcaggataaacaaccgacatatttggctgaagccgatactatttttgcacaggtggctgttaaagttcctgataactatttgggaaatttttggcgtgcccgtgttaattctttgcgtgatcctgaaaccactcagggactggcaaagccgtattatgaggctgcactgagtattctggaacagaagtctgatgctactaaatcagtattggtagaatgtaacagctatttggggtattattattttgtaaaagaggattataaccagtcaaaacagtattggaataaaatattggaaattgatcctgagaacgaaactgctactaaggcactaggaggaattaaatagtccttctttttttcatttatcatttgggttgagcggacagtacttagttgctgcccgcttaatttgtttagagattaacgaaagttaaacattggctatacttcttgtttattcaaataaactatatatatttgtagtatactaatgaactagtacactaaataactaataaaaacataaacacaatgatgattgaaataaagaacttatctttcagttatggaaagaaaaaacagagtgtctttaatgacctctcgttgacgctggataaaggttcagtttacggtcttttaggaaagaacggtacaggtaaatctactttgctctatttaatgacaggtctgcttcgtcctcaggccggacaggtactttacaaaggggtagatgtttccatgcgctatcccctgactttgcaggatatgtttctagtgcctgaagagtttgctttgccatcagtcagtttgaaacgatacttaaaactgaacacaccgttctatccgaattttagcaatgagcttttgaatgcctgccttcatgattttgatatgaatgaagatattcatttgggtgaactttcgatggggcagaagaagaaagtatttatgtgctttgcattagctaccaatacctctttattgattatggacgaacctagcaatggattggatattccttctaaaagtcagtttcgtaaagtaatcgcttcgggcatgaccgatgaaaaagcagtcatcatctctacgcaccaggtgagagatattgacagcctgctggatcatgtggttattattgatggaacccgcgtattattgaatgaatcggtaaagacgatctgtgagaaactttattttgtagagcaaggaatgaatgaatcgacggatacagcattgtatgttcagccgtccgtccagggaaacagcgtaatttttccgaatacatataatgaggaaacgaatctgaacttggaagtattatttaacgctatgctgacagagagagaaaatgcaatttctgtttaacaagtaatacaaacacactatggatacgaataaattctttagcttttcgcgtattgcaatggtaatgaaacgcgagattatggaaaattggaaaacaaatctttatcgtctgatcggaatttatgctgcatttgcattggtaatggtgctcacaatgtcgaaacaggtgacgtatagtgattctcaaatggcttttcagcattattgttctaatataatgggaacctttgcttttatcatcggtatttttggcattgtctatgctgctaacattatggaaaatatgattacaaaagaaaaacgtatcgcttttctgatgcttccggcaactatgatagagaaatttgtagcacgattcttgattgttacggtaggattggctgtggctgtctttgttgcggcgtcattggcggaaattacccgttatctgttacttcctttatttaatgtgcctgaaacattccatcaatctgttttgtataaccttctttctatggcttcggtagatggtgagcagatatataggggatcaggctatgctatgaatatgccgtaccagaattggttgggtgaattgtgcggatgggctttcctgttatggtcacattcattgtatattctagggggaaattattggtataagaaaccttttttcaagacattgggtgctttgatgcttatttctattctgttttctgttttatcggtgcacattctttcatggataggagatgacaatatgcgcagtttttctgagtggctggaaactaatttccagtggatgacattaaacaagttactttcgttaggagtagcgtttttcagtgcattcactatgtttaactggtggctgagttaccagctttttacccgttcgcaagttgttaaacctaaattccgtttgctatgaaatttaaagaaagtaaatccatttacttgcagatagccgaccggataaatgatgaaatcctgcaaggacaatatgccgaggaagggcgtattccgtctgtcagagaatacgccgccacggtggaggtgaatgcaaatacagtggtccgtacgtatgattaccttcaaggacaagagattatttataataaacgcggtattggttattttgtatcggcaggggctaaagaccggattatcactttgcgtaaagatatgtttctgcatgaagaattgccggagtttttcagacaagtgagtgcattggatattcccataaaggaaatagagaagatgtacaaggaatatctgacccaacaataacacaacacatatatggaacaatgcagacatggcatcggttgaataaagaaatcccggcagagtggcgctcgtcgggatttcttgtatttgttcacttgtttgctataaaaatagtagtccagtataaccattcggttgcagctcgaaggatatcggggttgatggatcggatattatctttaggatgatggtaatagccacctcctaatgcccataaatcaatgcatggataaccggctttcataaaaacagcaccatctgtacgaggacgagtcaggaaatgagtttcattagtgaacagacgtcgatgcacatacatagcattggctttttgggacagtttggccaattcggggtatttatagtggtagttcgcccctaacatctggcctacacccacctgctccagattcaggattgctattactttatcctttggtacaagaggatgattagtataataagtgctaccggtgagtccggcttcctcgccgtccacactcatgaaaatgatgctgcgtttgggttttatctttgattttgccagtgcttcggctactcccagcatggcggcggaggaagaattgttgtcattcgctccttcaataaggaaaggaatcattcccaagtggtccagatgggcggaaatgattacatattcattgcacagtatagggtcactgcctttgatcatacccaaaatattttttccagtagcattgggattataggtagcattcattttgatgtgggctctctttccggtatggaaagaggcaggcttctgagtcttataaatctgccggatagtctctttataagtcttgcctgttcccctgaaaatatcattaaccacagtgtctgtaacatgacaatagacaaatcctggattatagggggcatttggaccgggaacccatttgtataacaagcctgccgcaccatgggttacggcattgttcagcttggtttggtgcaaagtatgtttgtaccacatggtcagtgaatcggggttacggcttatattgggtgtttctccctccaccagcacaatcttgccttttacatctatatctttgtaatcatcatatgctaattcgggtgctgtaacgccaaatccggcgtataccacatcggctgtcacttccccgtcactggtcattcctccggcaaaccaaccatctgcccaaggatatgtcttagagatccatacagtttttttcttgccttgggtgacaggaaataggatatccatagtgcttcccggttgtatttccacacaagggtgggggaatagctgtatgtaggaaccattctcaccaccgggtatcagttcccactctttaaaatatccttttacgatatctacagctttagccattccgggcgaacctgcgagtcgtccctccaaggctgggtctgaaagttgctttacataaccgaaaatcttttcggtagtgatgttatgatgcatggcatcaaggtacatttcttcatcagtcatggtggctgttcttttttgggcggatgaggacagagagcccaatgctagaattgcagataacagaaggattccttttttcatgttgttctattgatttaagatttggttctaaagataaaaagaaaagatcagattcctatttatcttctggtaaaaatcttaagttcatatttcttgatataaatcaaaccgttgcatcgtgaaaagtccgtacctttgcaccccgaaaatcaaagatgataagtggacgtaattcaagaaccgaggagcatacgaaagaacctagccagactggcggttcctattttcattgaaacattactgattatgatgctgggtgcagtggataccgtgatgctgagtcagtattcagacaatagtgtggctgctgtaggggtggtcaaccagctcattatgtttgctttcctgatatttgaggtgatcaatataggaacttccgtactctgttcgcaatatttgggagcaagaatgcacaagaatatggtgcaggtggtgggagtatcattgatactcaatctggcgttcggtttattcgttagtgccattttacactatggagccactttcctgttgtccatgatggggcttcgttccgaactgatggaatatggagtgagttacatggagatagtaggggcattcgctttttttcaagccatatctctgactatttctgcctctttgcgcagtgccaataaagcagtttatcccatgatggtaacggtagttgtaaatattctgaatatcattggtaactattcgctgatttttggtaagttcggtatgccggctttgggagtggaaggtgctgctatttctactgcatttgcccgaggggtatctatggtgatactttttgtgattcttttccgtaaacatattcccagatttccgttatcctattttcgccccttcccgtttgtcgagctgaaaaacctgttgaaaatcggagtcccttcggccggagaaaatatgtcctacagtttctctcaggtagtattgacctattttattaatatgttggggaatgaagcgctggctactcgtacctatgtggtgaatatagtgatgttcgtttatttgtttgctattgccatggcacaaggcggagccatctgtattggtcatttggtaggtgagaggaaacttcatgcagcttatctgttgggcaaatatgtgatgcgtatttctattttggtttctttagttttatcctgtatctgggctttgatggggcatactttgtttagctggctgacggataatccggaaattatccgtttgggtactattatcctgtttattgatgtgattttggaagtgggccgggctattaatatttatgcgacgaatgctttacgtgcaacgggtgatgtgaattatccgttttatgtaggatttgttgttcagtggagtgttgccgtaggttgtggtttcttgttcggtattcattggggatggggactggtaggtatgtggtgtgcatttgtgctggatgaaaatcttcgtggtattatctttgtacagcgttggaatagtctgaaatggactaaaaagggatttgtgaaataaatcttcattttcgcaaactttatgcatcttcagaccgttaaactcaagaaaaagaattaattttgcagtctgataattatcaaagaatataatatggagctcgatttactcacggcaatatcacctattgacggtcgatacagaggaaaagcgggagctttggcctcttatttttctgaatttgcactcatcaagtaccgtgtgcaggtagaaattgaatactttatcactctgtgtgaactaccgttgccacagctgaaagactttgatcatgcacgttttgatgcattgcgcgctatttataagaacttttcagaggctgacgcacagcgtattaaagagatagaaagtgtaacaaaccacgatgtaaaggctgtagaatatttcatcaaagaagaattcgataagttgggcggaatggaggaatgcaaagaatttattcatttcggattgacatcacaggacataaacaatacctctgtacctttgtctataaaggaggcattggaacaagtatactatccgcaaattgaagagctgattgcccagttgactacatacgctgaagaatgggcaaatatccctatgttggcaaaaacacatggacagcctgcttctccgactcgcttgggtaaagaaatcatggttttcgtttatcgtctgaatcgtcagctggctgtattgaaagcttgtcctgtcacagctaaattcggtggtgcgacgggtaactacaatgcgcatcatgtagcttatcccgaatatgactggaaagaattcggtaataagtttgtagcaggaaagctgggattggaacgtgaggaatatactactcagatctctaattatgataatctgggagccatttttgatgcgatgaaacgcatcaataccattatgattgacatgaaccgcgacttctggcagtacatctctatggaatatttcaagcagaagattaaagcgggtgaagtaggttccagtgccatgccgcataaggtgaatcctattgatttcgaaaatgctgaaggtaatctaggtatggcaaatgctattttggaacacctttcttctaagttgcctgtttcccgcttgcaacgtgacttgacagactctactgtgttgcgtaacgtcggtgtacctttcggtcacattgtgattgctatccaaagttcgttgaaaggtctgcgcaaactgttgctgaatgagaaagcaatctatgccgacttggataattgttggagtgtggtggcggaagctatccagacaattctgcgccgcgaagcctatcctcatccgtatgaggcattgaaagctttgacccgtacaaaccaggctatcacagaagagtctattaaagaatttatagaaacactaaatgtaagcgaagacattaaaaaggaactgcgggtaattacaccgcataattatacaggtatttaaaaaatagttagttagattttaatccaaaaagcccgagagggcgttatacattaattaaaaaataaaaggaaaaccatgagtacagaaaatgaaagcagacaagaaggtgctgcaaatgaagaaaaccagaatgtaagccgtgatggtggttataagtcttataacagagacagtaattacaacagatacaacaacgacggcgaacagcgtccttatcgtcctcgtacgaacagctataatcgcgaaggtggagaccgtccctaccgttcttcttataacaacggtgaccgtccttcctataatcgctataacaataacggagaccgtccgcaacgtccccgctttaatcctaacagtgaggatggaggagaccaacgttcataccgtcctcgtacaaattataatcgtgaaggtggcgagcagcgtccgtatactccgcgccctcgttttaataatagtgaggaaggtggtgagcgtcaatatcgtccccgcacaaactataatcgcgaagggggtgagcagcgtccttatactccgcgtccccgttttaacagcggtgaagggggtgaacagcgttcttacactccgcgtcctcgtaccggcggttataatcaaggcggtgaccgtccttatcgtcctcgtaccggcggttataatcaaggcggcgaccgtccttatcgtcctcgtaccggtggttataatcaaggtggtggatacaatcgtccctatcgtccccgtacggctgattataacccgaatgcaaagtatagtctgaagaaacagattgaatataaagatatattgaccgatccaaatgagccgattcgtctgaacaaattcttggctaatgcaggtatatgttcccgtcgtgaggctgatgagtttattacagcaggtgtagtcagtgtaaatggtgaagtggtaaccgaattaggtactaaaatcaagcgtactgacgaagtgaagttccatgacgaaccggtaagtattgaacgcaaaacttatattttgttgaataaaccgaaggattgtgtgactacttctgatgatcctcaggaacgtaagactgtaatggattttgtgaaaggtgcttgtaaggagcgtatttatcctgttgggcgtttagatcgtaatactaccggtgtgttattgttaactaacgatggtgatttggcttccaagctgactcatcctaagtatttgaagaagaagatttatcatgtatattgtgataagaatgtaaccaaggcagatcttgaccaaattgcagcaggtgtgacattggatgatggagagattcatgcagatgccatcagctatgcatcggaaacagacaaatcacaagtcggtattgaaatccattccggaaagaaccgtattgtgcgtcgtatttttgaatccttgggatataaggtgatcaagctggaccgcgtttattttgctggtctgactaaaaaaggtttgcgccgcggtgactggcgttacctgactgaacaagaagtgaacatgctccgcatgggctcatttgaataataaacaataaagagacaaaacaatggaaaaaattagtagaacaaagattgttgacctgctgaagtgccgtgattttggtgcgatggtcaatgtaaaaggttgggttcgtacccgccgcggtagcaaacaggtaaattttatcgccctgaatgacggttctacaataaataatgtgcagattgttgttgatttggcaaactttgacgaagaaatgttgaagcagatcaccaccggtgcatgtatcagtgtgaacggtgagttgaccgaatccattggctctggtcaggcagccgaagttcaagcgcgtggaatcgaagtattaggtacttgtgataacacttatccgttacagaagaaaggtcatacgatggagtttcttcgtgagatcgctcacttgcgtccccgcaccaatacatttggagctgtattccgcatccgccacaacatggctatcgctatccataagttcttccatgaacgtggttttttctattttcatacacctattatcacagcgtctgattgtgaaggtgcgggacagatgttccaagttactaccaagaacctttatgatttgaagaaggatgaaaacggagcgattatttatgatgatgatttctttggcaaacaagccagtttgacggtatctggacagttggaaggtgaattggctgctactgctttgggggctatttatacatttggtcctacattccgtgcggagaattctaatacgccgcgtcacttggccgagttttggatgattgaacctgaggttgcgttcaatgatattactgataatatggatttggccgaagactttattaaatattgtgtacagtgggcgcttgacaactgctatgatgatgtgaagtttttgaacgacatgttcgataagggattgatagaacgtttgcagggcgtgctgaaggaggaatttgtccgtctgccttatacggaaggtatcaagatactggaggaagctgtagcaaaaggtcataaatttgaattcccggtatattggggagtagacttagcctctgaacacgaacgttatttggtggaagagcactttaaacgtcctgtaatcctgacagattatccgaaagaaatcaaggcattctatatgaagcagaatgaggatggcaagactgtccgtgcaatggatgtcttatttccgaagattggcgagataataggtggttctgaacgtgaggctgattatgacaaactgatgacccgtatccaggaattggaaattccgatgaaggatatgtggtggtatctggatacccgtaagtttggttcatgccctcattctggttttggacttggttttgagcggctgttgctgtttgttaccggtatgaccaatattcgtgatgtgatacctttcccacgtactccgcgtaatgctgaattctaattgttggaaataataattcaaaaaatcctgccctataacatagagcaggattttttttgtatttaactgtaaaaaagttatttaaaaagcaggaagtttgaaaaaaatttctaattttgtatatccacattacgcaatttgttaactaaatatatacaactatgaaacggaaaaaattattcctactgatgatagcattcttgcttatcggtacttcgcgtgtagtgggacaggaaaaatcggatgtaacccctgtcaacttgaaaggaatttggcagatgtgcttttatgtatcagggactcctcaggtaccgggtgagttgaaaccaagtaattcttttaaaattttgtctgatgacggcaagtttaccaatatgaccatgattcctaatcatggagctattattattggttccggtacctatcggcagactgctcctaatgcttatacagagcatgtggagaaaaacttgcatcttccacaattggtaggtgtggataatattttggaatttgagatgaaggggggagatgtcatggtgctgaagttttttgtgaaaacggataaggatggaaatgaaatcaattcctggtattatgaaacttggaaacgagtgaaaatgcctcctgtttatccaaaggatttggtcagataagtttgaatctttgtttataaacaaagaatagtcatttttcgggctacgctttcattttttgaaagtgtggccctatttattttatacatgatatttgtctgacgaaacaagtgtacttgctattatggtgggatatgtgtcctatttatatgattacttgtttggatacttaaatgaaagatgcttatgtactaattttcttcaataaaatgatgtaatgagtaactgctacctgtttgcaggttgcttaaatataaggtaaaactcctgtaatctcttcttaatttgcacagaatttcaaaaaatgtgctattcttcatcacttttatgccttttcaagaacaaagattggaaataatcgttaactttgtcgccaataacagaaatagaaaaggagattaatgtctaaactttatataatagcggggtgtaacggagccggtaaaacgaccgcttcgtacacggtattacccgaaattttagagtgccgcgaatttgtcaatgccgatgaaatcgctaagggactttctccttttaacccctcaagtgtggctatcgaagccgggcgactgatgctgaaacgtatcggagagttactgtcggccggagtcagcttttctgttgaaaccacattgtccacccgttcttatatcaatcttatccagcaggcacaaaatcaaggatatagtgtcagccttatttatttttggctgaattcgcctgaattggctatagagcgagtgaaacagcgtgttgccaatggagggcatgatgtgcctgctcccattatccgtcgtcgttatcgttcggggttggaaaactttttccgtatttatatgccttgcgtggattattggatgcttgcggacaatagctgcacaccgcgtgttattgtggcggacgccttccgtttgggagatgaggcccatatctataatcaagaactttttactaaaatcagaagttatgtcaactgaagaagaatataaggaattaagtgcgaagttgcgttatggtttagaactagcggaacagcggttgatagaggaaactgcacggcgcgaagggacattgtgttatggtcgtcccgatggaaaagtagtccggatctcagcaactgaacttttaaagcttcgtcagtccagtggaaacaatgcggcatctgtggctgtgtgtacttgctctgagatggagagtggctggaatcgttgaaaatagaatgaataactgtatatgtatagggaagaatcaaaatctcttccctatgttttttagtccgttattcaaagcctagatgtggttatatcagccttttgtatgcgaatagcaagaggaaaaaatatcttaatttatttgtcagttcaaagaaaagccgtacctttgcaagccgattattatcaaaagtttataaaggattaattcttagcgtgttaatagttctttgtccgggaacggttagaaacgctgagaagaattgttttttagtagttaacatttaaaaaagaatttaagagtggatactttaagttacaagaccatttctgcaaacaaagaaacagctcataaagaatgggttgttgtcgacgcaaccgatcaggtcgtaggccgtctcggttcgaaagttgcgaaactgttgagaggaaagtacaaaccagactttacccctcatgctgactgcggtgataatgttattatcattaatgcagacaaagtgaaatttaccggaaacaagtggaacgacaaggtttacttgcgctatacaggttatcccggtggtcagagagaaatgactcctgctcagttgatgaagaaacctaacggtgaagaaaaactgttgaagagagtagtaaagggtatgcttcctaaaaatcgtctgggagcacagttgctgggcaatttgtatgtttacgctggtagtgaacacaaacatgaggctcagactccgaaatcaattgatataaactcacttaaataataaagaatggaagtagtaaatgcattaggcagacgtaaacgcgccgtagcacgcgtgttcgtaagcgaaggtacaggaaagattactattaacaagagagaccttgcacagtactttccatcaactattcttcagtatgtagtaaaacagcctttgaacaagctagaggctgctgaaaaatatgatatcaaagtaaatctttacggtggtggttttacaggacagtcacaggctttgcgtctggctatcgctcgtgcgctggttaaaatcaaccctgaagataaaacggctcttcgttcagaaggcttcatgacacgtgactctcgttctgtagaacgtaagaaaccgggtcagcccaaagcacgtcgtagattccagttcagtaaacgttaatatccggttttacttggaactggttaagaagcgtttagtatctaaaccagcgggactctacttggtagcggactacccgatggttggttgagataaacaaaaaagaaagtaaacgatttaaagaataacaaaatgtctagaactaatttcgatacattattggaagccggttgccacttcggacaccttaagagaaagtggaatccctcaatggctccttatattttcatggaacgcaatggtatccatatcattgacctccataaaacagttgctaaagtagatgaagctgctgatgcactgaaacaaatcgcaaaatcaggtaagaaagtcctgtttgttgctactaagaaacaagctaaacaagtagtagctgagaaagctgcttctgtaaatatgccttatgtaatagagcgttggccgggtggtatgttgactaacttcccgactatccgtaaggctgtgaagaaaatggctactatcgataagttgaccaacgatggtacttattcaaacctttctaagagagaagtcctgcaaatttctcgtcagcgtgctaaattggaaaagaacttaggttctatcgctgatttgactcgtttgccgtcagcactgttcgttgtcgatgtgttgaaagaaaacattgcagttcgtgaagctaaccgcttgggtatccctgtatttgctatcgttgatacaaattcagatccttcaaacgtagacttcgtgattcctgcaaacgatgatgctactaagtctgtagaagtgatcttggatgcttgttgtggtgctatcgctgaaggtttggaagaaagaaaagctgaaaaagtagatatggaagctgccggtgaaaatgctcctaagggtgctggtaagaagaaaaataccaaggctcgtatggataaagccgaagaagaagctatcaatgctgctaaggctgccgctttcttgaaagaagacgaagaagcttaatagtataaattgagagttgagaattgaaaattgggaaaggggcagattatgctgttaattctcaattctcaattttcaattctcaattctgttttaaagatattactaacaattaaaaaataaaggaatattatggctgtaactatggctgaaataaccaagcttcgtaagattagtggagctggtatgatggattgcaagaacgccttgactgaagcaaacggcgatatcgataaagcgatggaaattattcgtaaaaaaggacaggctgttgctgcaaaacgttctgaccgtgaagcatctgaaggttgtgtgctggcaaaaaaggatggcgaatttgctgctatcatcgctttgaaatgcgaaaccgacttcgttgctaaaaacgctgatttcatagctttgactcaagctattctggatgctgctgttgccaacagatgtaagactttggaagaagtaaaggctttgcctatgggtaacggtactgtacaagatgcagtaacagaccgtagtggtatcactggtgaaaaaatggaattggatggttacaatgtggttgaaggtgcttatacttctatttataaccaccagggaaataaccagctttgtactattgttgcaatgaataaagaagctgaagctgccgctcacggagttgctatgcagattgctgctatgaatcctattgcaattgatgaagccggtgttcctgaatctgtaaaagaagctgaaatacaggtagctattgacaagactaagaaagaacaagtagacaaggctgttgaagttgccttgaagaaggctggtatcaaccctgcacacgtagacagcgaagaacatatggaaagtaacaaggctaagggctggatcactgacgaagatattgccaaagctaaagaaatcattgctactgtttctgctgaaaaagctgctaacttgccacaacagatgattgaaaacattgctaaaggtcgtctgggcaagttcttgaaggaagtttgcttgctgaaccaagaggatatcatggatggtaagaagactgtaagagaagtgttgaaggaagctgatcctgaattgcagatcgttgctttcaaacgtttcactttacgtgctgaataagatttccgcaattatagaagggggactgtgtgacaacagtccctttcttttttccggctatttggtctgggtatatccttcagctttcaacaactcgatgacccgttgcttgaactctccttgaataaggatctccccgtcttttgctgaaccgcctaccccacatttgcttttcaataatctacccaactctttcaggtcattttctgttccgatgaacccgttgattaatgtcacggttttgccactccgtccttttttttctatattgacacggagcttttgttgttttttatctaatgttttagtctcttccttttcaacgttttcatacttgaaatcaggatttgtggaataaaccacattcagacgttctttccaatcgttatttttcatgtgaattttgcttaaatgaatactcaaagataagactttttttatactctatccgtcaatgtaacaaataaaagtgtacttttgcaaattacctaatgataatacctaaagaaaaagatggatatacgtatgcataaattctcggataaagtgcctgagccgactttgcgcagacttccgtggtatctttcgaatgtgaaactgatgaaagaacagggagaaacgtacgtgtcttctacccaaatatccaagcaaatcaatgtggatgcttcccaaatagcgaaagatctttcttatgtaaatatatccggccgtacacgtgtgggatatgagattgatgcgttgatagaggtgctggagcgtttcttgggatttaccaagatgcataaagcttttttgtttggtgttggtagtttgggaggtgctttgttgcgcgactcgggcctgcatcattttggattagagatagtaggtgcgtttgatattaaccccgaactggtgggaaaggaaataaatggaattcctatttatcattcggatgaatttgaggtaaaaatgaaatcctgtgatgtcaatatcggggtgttgactgtgcctattaatatagcacaggagataacagataagatgatagcgggtggcattaaggcagtttggaactttacaccgttccgtattcgtgtaccggaaaatattgtggtgcagaatacatcactttatgcccatctggctgtaatgtttaacagattaaatgtaattcaagaataataacatgaagattatagccgtaggaatgaactacgttgcacattgccacgagttgcatgctgatgagaatttgccggaagaaccggttatttttatgaaaccggattcggctctgctgaaagacagcaagccgttttttattcctgatttttctcagcaggtggattatgagacagaattggtagtacgtattaatcgtttgggaaagaatattgctccgcgttttgccagtcggtattatgatgcggtgacggtaggaatagattttacggcacgtgaccttcagcggcagtttcgggaggaaggtaagccttgggagctgtgtaaagggtttgatagctcggctgccataggtgattttgtgccggtagacagatttaaggatatacagaatttgaactttcatttggatatagatggaaaaacggtgcagagaggtaacactgcagatatgttgtttaaggtggatgagataatcgcatacgttagccggttttttacattaaagattggggatttgctttatacagggactcccgtgggagtagggccagtcagtataggacagcatttgcaggggtatttggaaggtgaaaaattattagatttttatgtaagatgaaaataagagtaggatttggatttgatgtgcaccaactggtaagcggtcgtgaattatggcttggaggaataaaatttgaacatgaattggggctattgggacactcggatgccgatgtattgattcatgctatttgtgacgctttgctgggagcggccaatatgcgtgatataggttatcattttcctgatactgcaggcgaattcaagaatattgatagcaagattttattggctgaaacggtggacctgattgctgcaaaagggtataaagtaggtaacgtggacgcaacgatttgcgctgaacgtcctaaattgaaggcgcggattccggaaatgcagttggtgcttgctcatttgatgaggattgatgtggatgatgtttccgtaaaggctaccactacagagaagctgggattcacgggcagggaggaaggtatttctgcttacgccactgtattaatagagaaagcggaatgatttttatagaataaggccgaatgctagtaatactccgaatagtagcatattacgggaggtttctcccaatatgctgtttaattcttttccctttttgatttttaccattttttgccatgccatgaagtgaggtaacagataaagttggggtaataatgcagcccaaatgtgtccggtcggaataaacaataaacaaagccatgcggcagccaatcccaaaaataggtataattgttgccctgcattggctccccagcgtactacgattgttttctttccgctttttgcatcttgatcgcggtcacggtaattattcaccatcaacaaggtatctataatcagtccgcaagctagagaggcgagtgttacattccaagtccagctacgacacatcacatagtaagtgcagcctaccggtacaaacccgaaaaagacaatgacaagtatgtctccccatccgtgataagctagcggataaggtcctgctgtataaagaaaagcgaataaaatacataaaattcccactggaatcatttcaatccctccataagctaataggcataaccctgctaaacaagctgtcgctgtggtcagggcgattcctttcctcatggcgttcagtgtgatccatccttgtgcgcaggcacgttcaggacccaagcggtcttcacggtcactgcctttcagataatcaaagtaatcattaatgaagttggcatctatctgcatcagaaaagcgaagagaaagcaaagcaatgctggtgtcatttggaagcagctgtctgcataggccaaggcacatcccagtaaaaccggagtggcggctcctgccaatgttttaggacgggcggctagaagccatgcttttattgagttaacttgaacaatttccatttctatttataattaaggttgtgcaaagataaaacaattaattctgtatctttgtctccaaatagaaaggattatgaagaaacagtttctttttttacttttagcggttatttttttgtcttcttgcgccacagctactttgtccgagtttccgggagtaggacgtgtgaagcaatatgatttttatagttatgatattccacccgcttttgatggttttcggataggatttgcttcggattttcattatgagagtcgttttaagaggagtgaattgaacagtgcggtacgagcattaaaatcaatgcatgccgatgttctgttgttgggtggagattatcgtagcaagaaaggtggaaatctagacactttgttcaccgccttgagcagagtttatacaccttacggaacatttgctgtgatggggaatcatgattatggttattgctattccgaagtggtggaggccatgcaaaagaatcatgtgcggttgatggaacataaaagctataagttgatgaaagatggtcagcatattatagtaagcggtgtacgcaatccgtttgatttaaaaaggaatggtgactctccatcccagcattttccagcggatgattttattatattgctcacgcatactcccgactatgcagaagatacagatgtatcgaatgccaatttggtgttagcggggcatactcatggcgggcaggtgagcttgtttaaaaaatattctccggtaaagcactccatttatggaaaccgttttttgactggttggaaagagaatagtaaaggtactccgattattattaccaatggattgggtacttcgcgcgttgacgtccgcttatttactcccagcgaagttgttctggtagtcttgcatcgtgttgaaaagcagaaagaatagactgtttgtccgttaataacgtacagggtgtccataatcggacacccttttttatgtttacttattgatacttagtggattaatttcgtggcatgtgctttgcactttataaagtgaagcggctcaagaaaaaaaacggatcatgttgcaacgtttttagagtcatttgcgtcttataaatagagacacaaataaacccgaattataaacattaaaaataagacattatgaaaactacaatgatcactaaagccatgatggcagttctttttgcaatgacaagtgtattaacgctgaatgcagtcgagcctgtgaaaattacaaatgaagaggtggaaaatggtcgggtgtcggctaaggtcgtttatgaacaagagggtactttccttactccggagtatcgttttgagttcagatacaacgataagggacaaattatagagaagaaaagtatgaaatggaatggcacgacttggataaattattattgtatggaagttacgtacacagacacagaagcgcatattgattattctttgtggaacaagaataaaaaagcgtttatccctacgcagaaatatgtatatacgttagatgaagctgggaagtttttggcgtggcactcatataaaaaagatgcgacaggctgggagttggacggattaataaataatgaagtactgctggcaaagcgttaatggagtgcgtcctttgaattttagattaaataattgatgtgtttttccccgggaaatttggattgtgtcctcccggggatttttatttttttagccgttcatatactgccggatgcaggaaatatcgtatatctcgtccttccgctagtgcctgtctgataaaagtagaactgatttccaataacggagtatctgctaattgcacggaaggaggaagagttgttggatcaatagtgaaattcggacggggatagatcattacatgatgattctttaaaatttcctttgctttgtaccaacgggggaatagaagccagttgtccgccccaatgataagagtaaattctcggttgggataggctttgtgtaaagcgtccaatgtgtgtatagtataggaaggacgaggaaggtagaactcgaaatcggaagctcggaatttgggataatccgcaatggccagttttaccagttccaatcgcagattatcatcccataaatccgtttgttgctttaatggattgtgaggagagacgagaaaccatatttcatccaatccattatattcacataaataattagcaagtgccagatgaccaatgtgaataggattgaatgagccgccgaaaataccagtctttatcttactcttttccatttattgtaattccatacttgtcccacagtgacaatacccattgctatggcaataatgtattgctccattgccattgcaatgatgcccacagccaaagctataaaaccaatgaggatacaaagtatcgacattctttgggccagttttttcggatctttgatcatcgtcttatttttcaataaaatttttaataactttcagtgcttccgcttttgctttctccaaatcgtcatttactatcacggtgtcgaatttatcggcgaaccccaattcaaattctgcttttgcgattcggctttcaattacttcgggggcatcagtaccacggcctttcaggcgtttacggagttcttttacactgggtggttgaatgaaaacagacaatgtgcggctgccataatattttttgatattacatccgcctactacatctacgtcaaaaatcacattttgtccggcttccaattgtttttccacttgtgctttcaaggttccgtagaaacggttttcgtatacttcttcgtattccagaaattcatcattggcaatgcgttgtttgaattcctcaggagataggaagaaatattccacaccatgccgttcttttccgcgaggagggcggctggtggcagaaatagagaaagacaggttcaggttttgtgtcagcagatagttgataatggttgatttgcccgaacctgagggggctgaaaaaatgataagttttcctgttgccatatcttgattctttgcttatgagaatggggtccggtatatgaaccggttacattacatttaatacctgttctttgatttgttccagttcgtccttcatctgcactacgatgttttgcatctcggcatgattggatttgctgccggtcgtattgatttcgcgtcccatctcctgtgctatgaaaccaagttttttcccttgcccatgaccgcctgccatggtttcacggaaatatctcaagtgattgctcagtcgttgtttttcttcgttaatatctaatttttcaatgtaataaatcaattcttgttccaagcggtttttatcataatccacactgatggtcttttccaaagcatctgtaatgcgttcacgtatcttggctacacgttctgtttcgtagggctcgatggactttaacaaactctcgatgttatcaatcttttcgttgaatttcttttccaaagcggttccttcctgtttgcggaaatctaccaaatggttgatagcctcttccactacctggcggactacctcccattcttcttccgaaagttcttgtacatcggccttggttagtacgtcgggcattcgtagaagggttgcaaaccaatcttcgggcattggtatatgggtcatttcggaaatagattttatctgattgtagtagttttctacaagggcggcgttaatgggagtggctgtatccgaaacgtctttctctatccacaggctgaaatcaactttaccgcgttccaatgatttggaaatcatattgcggatttccatttctttttcacggtataaaggagcgatccgtgtagacaagtccattgctttactatttaaagacttgatctctacgttaatttttttttctccgaatatagcggttgctttaccgtatccggtcattgactgtatcataactaatatgtttttttgcaaaagtaatctttttatggaaatgaagtataaataaaagtgtatatttgcagattatattatataagtagagcattatgtcgtgtattttgcatattgaaacttcaacagaggcctgctctgttgccgtcagtgaggatggattggcggtgttctccaaagaggatttgaaaggaccttcacacgccgtgcagctgggcgtatttgtagatgaggctttgtcgtttgtcgacagtcatggtatgccgttggatgcagtggctgtgagttgcgggcccggctcgtacacagggttgcgtattggtgtctctatggcgaagggtatttgctatggacgtaatttgccacttatcggtctgccgacattggaggtattgtgtgtgccggtgttgttacatcacgatttgcctgaggatgccttgctctgtcctatgatagatgcacgtcgcatggaagtctatgcagctgtttatgaccgcgcattgagcgtaaaaagggaaatagctgccgatattgttgatgagcattcctatttggagtttctgaatgaacatccggtctatttttttggtaacggtgcagccaaatgccgtgggcagattactcatcccaatgctcattttattgatgacatccgtccgttaggtaaatggatgtttccattggcagaaaaggaaatggtaagacagaactttaaggatgtggcttattttgagcctttctatttgaaagagtttgtagcttccaaacccaaaaagcttttgtaacagccgatgaacaaattagtgcataaatcataaattttaaatatatggagtataatactcaacaacgaactttaccccttcctgaatatggcagaagtgtgcagaacatggtagatcacgccttgaccatcgaggacagagctgagcgccaacgttgtgcgaacacgattatcaacattatgggcggtatgtttccgcatttgcgggatgtgcccgatttcaaacataaattatgggatcatttggctattatggccgattttaagctggatattgattatccgtatgaaattgtgaagaaagaaagcctggaggtgaaacccgatatgttgccttatccgcataatggaatccgttatcgtcattatggacgtattttggagaacatgattaaaaaggcagtggactatccggaaggtgaggagaaaaagcagctgatcagcctgattgcaaaccacatgaagaaatgcttcctgaactggaacaaagacggggtggaggatcagaaaatcttggatgatcttcgcgattactctaagggagtgattaatctgacccctgaagacttgcatttgaatgagcagcaacgtgtttatgttccacgcaggccacaacagaataacaatcagcgcagaccgcaacaaaacaacaatcaaagaaagaaatattaattcctaaaaaatgataccatggcttcgtttgtaattgaaggaggacataaattgcacggcgaaatacacccgcaaggtgctaaaaatgaagtgttacagatcctttgtgccactctgttgacctcggaagaagtgacagtaactaatattccggacattctggatgtgaacaacctgattcagttgttacgtgatatgggcgtcaaggtatcaaaaacaggaattgattcgtatacatttaaagctgacactgtggatttgaactacttggagagtgatgaattcttaaagaaatgttccagtctgcgtggatcagtcatgttggttggtccgttggttgcccgttttggaagggctttgatttcaaagccgggcggtgacaagattggccgtcggcgtttggacactcactttatcggtattcagaagttgggagcctgttttaattatgatgaggaacgaagtgttttcagtatttgcgcaaagcatttggaaggtacttatatgttgctggatgaagcttcggttaccggtacggctaatattgtgatggcttctgtcctggcgaagggcaaaacgaccatttataacgcagcttgtgaaccttatctgcagcaactttgtcgtatgttgaacagcatgggggcgaagatttccggtattgcatctaatttgctggctattgaaggagtggaaagtctgcatggctgtactcatcgggtgttgcctgatatgattgaagtaggtagttttatcggaatggcagctatgacaggaagtgagcttaccattaagaatgtatcacatgaaaatttgggcattattccagaaagttttcgtcgtttaggtattagagtggaacagcggggggatgatctatttatccccgagcaggaacattatcagatagaatcgtttattgatggctctattatgaccatagcagatgctccctggccggggttgactcccgacctgctcagtgtggtactggtggtggctacacaggcgaaaggcagtgtactgattcatcagaaaatgtttgaaagccgcctgttctttgtggacaagctcatagatatgggagcacagattatattatgtgaccctcatcgtgccgttgtaatagggcatgaccgtaatttccagcttcgtgccggaaatatgacttcacccgatattcgtgccggtatcgctttgctgatagcggcaatgagtgccgacggtaccagtcgcatacacaatatagagcagatagaccggggatatcagaatatagaccagcgtttgaatgcgcttggcgcacgtattactagaatttagagaaatcaatcatgattaaaaaagatgaagttttcaagattggtatattcaacaagccgcatggagtaaaaggagaaatctcattcacttttacggatgatatttttgaccgtgtggaatgtgagtatttggtctgtttgttagacggtatcttcgtgcctttctttattgaagagtatcgttttcgttcagataccactgctttagtcaaactggaaggggtggatacctcggaaaaggcccgtatgtttacgaatgtagaggtttatttcccgaagaaatatgtcggtgaggaggaagattcggatgatatacctacttggaactattttattggttttaaggtagaagatgtgaatcatggtgagttgggtgagattgtggcggtggatgacagtacgatgaatgtcctttttgccattgagaaaggtggtgaggaacttttgctgcctgcccacgaggaatttatcaccaaattggataagaaaaagcgtttgctgacggtcgaagtacctgatggcttgatataaatatagaaggtgcgcacgatgaagaaaaaaggaaggaaagcattttggcataatttcaagtttaagtataaactgaccattaccaatgaaaatacgttggaggagattgtgggactacacgtttccaaactcaatggtgtgtctgtattgctgtctgccgtaacggtaattttcctgatttcggcaactatcattgtttttactcctttacgtaattatttgccgggatatatgaacagtgaggtacgtgcgcaggtggtgaccaatgccttgcgggccgattcattgcaacaagtggtgacgaggcagaatatgtatatcatgaatattcaggatatatttagcgggaaagtaaaagctgatacagtccaatctatcgactctctgaccattcttcgttctgattctttgatggaacgtaccaggcaggaagaagagtttcgcaagcaatatgaagaatcagaacgatataatctgacggctgttgatgataataatgccgcttccggattgattttttatcgtcctacacgtggcatgatgtcttctaattttgacttggagaacaggcattacggagtggatattgccgctaatccaaatgaaagtgtgttggcaacattggatggaacagtgattttgtctacttatacagcagaaaccggttatgttattcagatacagcacggacaggattttgtgtcggtatataaacattgtggttcgttattaaagaaagaaggcgatccggtgaaaggtggtgaagctattgcattggtaggaaataccggtgaaaaaactaccggaccgcatctgcatttcgaattgtggcacaagggacgtgcgattgatccctcaaaatacattgtattttaacaacattatgaaaaaacaaatagcgatattaggttctaccggctctatcggtacacaggctttacaggtaatagaggaacatcctgatttatatgaggcctatgcgctgacagccaataacagggtcgatttattgatagaacaagcccgtaagttcatgcccgaggcggtagtgatagccaatgaggaaaaataccttcaattgaaagaggcgttgagtgatctgcctatcaaagtatatgcaggagcggatgcgctctctcaaattgtggaatcacagcctattgacattgtactggcttctatggtaggttatgccggattgcgtcctactataaatgcgataaaggcaggtaaagctattgctttggctaataaagaaacgctggttgtggccggagagttgattaatgcactggcaaatcagtaccatacatctgtacttcccgtggattcggaacattcggctatcttccagtgcctggaaataaataaccggttggagaaagtgatcttgacagcttcaggagggccgtttcgtacttatactatggagcagttgcaaacagtgaccaaagcacaagctttgaagcaccccaattgggagatgggagcgaagataaccattgattcggcttccatgatgaacaaggggtttgaagtgattgaggctaaatggttattcggaatgcgtccggagcaaattgaagtggtagttcatccacaatctgtcattcattctatggtgcagtttgaggatggggccgtgaaagcgcaattgggcatgcccgatatgcgtttgcctattcaatatgctttttcgtatccggagcgtgtgaaatcttctttcgaacggttggattttgcccgtataacagacctgacttttgaacagcctgatactaaacgttttcgtaatttggcattggcatacgaggctttgtatcgggctggaaatatgccctgtatagtgaatgcagctaatgaagtggtggtggatgctttcctgaaagacaaaatatctttcctgggtatgagtgatgtcatagaacggactatgggtaaagttgcttatatcaaggaaccgacttatgaagactatgtggctactgatactgaggcacgtcgggtagcgttatcccttttgtcatcttaaatggtagttgacagagaattatgttaattataaattataaaatagtaaatagctagatggaaacatttttgattcgtgcccttcaattgataatgagcctttcattattggtcattattcatgagggaggacattttcttttttcacgtctttttaaagtaagagtagagaagttctacatattttttgatccgtggttttctttgttcaaattcaaaccgaagaacagtgatacggaatatggtattggctgggtgcctttggggggatatgtgaaaatttcgggtatgatagacgagtctatggataccgagcagatgaaacagcctgctaaaccatgggaatttcgttcaaaaccggcttggcagcgtctgcttatcatggtgggtggtgtcttgatgaatttcttgctggctatcttcatctattccatgattttattccattggggagattcttttgtgtcgctgcaagacatgactcatggtatgaaatttaatgagcgtgctcgggaaataggcttccgtgacggtgatattctccttcgcgcagatgaaaaaccattggagcgtttcgggatggatatgcttcgtgatattgctgaggcacgtacagtgactgtatcgcgcgatggaaaggaaaccgaagtatatatgcctgagatcagcttgttggatatagcaaaggatgatccgatgtttgttacggcgttagttcctaatgttgttgactcggtgataccgggcggtggcttggataaggccggtatacagaagggagatagtttgattgcggtcaacggtgaaatgttgaactcatggaatgcattggtggaaaaactagataatatgcaggctgatgcggaaactaccggagataaaggagttgctatgcaaatggtttattctcgtggaggattgcgtgatacggttaccgtgcatacggactcactgtttagagtgggggcaacatttctttcattggccgattataaagaaactacccgtgaatatggattctttgaatcttttcctgcaggggtacaattaggagtaaatacattaaaaggatatgtgaacgatatgaaatatgtgttcaccaaagaaggagccaagagtgtaggtggttttggaacgataggaagtatttttccgaaagtatgggattggcatcgtttttgggaaatgactgcttttctgtcaatcatccttgcgtttatgaatattctgcctattccggcattggatggcggacatgtattattcctgctttatgaaatcattgcccgtcgtaagccgagtgacaaatttatggaatatgcgcagatggtaggtatgtttctattgtttgccttgctcatttgggcgaactttaatgatatcatgcgattcttgttctaagtttgcatgacagaaaaggacacggcatttttataacaatgccgataggcacggatttccgcaaagattgaatcaatcatctttgcggaaatctgcgttttttatattgtttttctcccgtggtgaaaaaaagacataaaaaaagagcgaaagttcttatcaaacccgctcacatcctgaagaaccccctctccataatggggttcttttcatctttctcgtctcagttgcgttatcctctctcttgtacctaaaaaaacaactcttttaatacctataaaactaatttcctgaaaactttctttttctaattaccttaaatcttgctgctaatacctttctaaatcaatctttctttacctaaatctaataccttaaattaaaatctttaccttaatacctaattttgttcttttctttattaacttaatatttggtttcacaaccacattgcaaaggtacggcttttcttgatattagcaagtaaatagatgctgaaaaacataaaaaagggtgaattcatgatatatatcaagaaaacaccctttttttatttcttttagcgttatcgcacacggatgatgcgttggttactgcttcccctaaattccaagtaaggagagtacaaatccggctcgaatcgtccgtctactataacatccacataatccagtaccggttttaacatttcatcgttttgtatttgttcaaatgtatatcctgtataacaccagatgttttgtccggtagcttctttgatctgtttgactagagccaggaattcttgaggatgataaagtggatctccaccggaaaaggtgattccgtccaataatggattagcatttatttcgcagataattttttctattttttccggtgtgagcggagtacctgccgatgggttccaggattcgggattctggcaaccgcgacaatggtgacggcatccggctagatagatagaatagcggatgccttcaccgtcgactattgtttcaggataggtaaataacaagttcatgctgattatccatgctttacccggtcacgctcttcggcacgcttggctgaattccaagtgctgaggtcgcctgtcaaatacccggtaatgcgacgcattcgcattatattctcgctctggcaaacagggcacttgtcgtaaatgacccctttgtaaccgcaagcctgacaagtatcaacaggatgattgatggaaccgtatccaatgccttcgtcatgcattacttttacaatcttggctatggcttttacatttttctgagcttctccgtccagttctacgtaagtgatatgtcctccgcgggtaatggcgtggaaaggagcttcccgttttatcttctcggtgatggtgatgggctcttttacatctacgtggaaagagtttacataatagtcattatccgtcacgccgggaatgatgccgtatttgcggcggtccatacgggtgaatcgtccggaaagtccttcggcaggcgtggcaagtacggagaaattcaactgatatttctgtttgtattcgtctgccactttattcatttccgtaacggcttcgaataatgtatcccatgctttctggctatgtgcgtgaccttctccataaagagccatcatggcattgtgcccgccgataaagcctatccccaatgtgccttgacgcaatacatcccccacctggtcgttgggcgaaagttttcctccgcctttccacacatcattccccatcatgaacgggaactggcgtgccaaggctgtacgttgatactggtagcgtgcatacaattgttcggcgattagttcggacaaagcatgtacactttctatgaatatttcttttgcttttctttctatggcctcttttttgcctgattcttccagactttctgccttgatgcgtgcttcgatggccagccggggcatattcatagtggtgaatgacaggttgccacgtcctaatgaacttttttcacccgctatattttcgtatacgcgggtacggcatcccatagttgccagttcatagcggtaacgtttagggtccttgatatcccatttctcatttttgttataaggagtatccaaaaacataaaattagggaacaaggcttttgcggtggtacggcaagctttcagaaacaagtcgaaattgggagcttggaattccatgttgccttccagtgccgcttcgaaattttccatggctttcttatagtcctcttcggaataagatactccgtctttaaccttgaatatctgtatggggaagactggtacttcgccacgggtacccaggccttcgatggtagctttcagcagttcctctatgaccatgcggccttcgggagaagtgtctgttccataattgatggaactgaatacgacttgatttccccctcgcgaatgcatggtgttcaggttgtggatgaatccttccattgcctgatgtgtatctttgcgcgtcatggcgtatgctttctcttcaattttcttgagagcctctgttccgggttcttttccttctacttctatataaaactcggttaaagttttcagatgtttgcgaaatgtcttccgtaccccttccgccataaagaagtcgaaggcggggatagcctgtccgccatgttgctcgttctggtttgtctggaatatgatggtggccagagtggcataactttgaatggactgtggagtacggatacttccgtttttagtgcggaagccgcgttcgaacaagtcatccaggtcatattggatacaagtggtagtcttggtgggatagtaatccaaatcatgtatatgtatgtcgcccaactgatgcgcttcggcatattttttaggcaacaaatatttataggtatagtctttagtaacttccgaggcaaaagtcatcatctgtccggcgggagtatggctggacatgttggcattactcaggttgacatcatttttgtcgatggctacaatgccgtccatgatgtgcttcatttgcgttttacggtcgcgttccgtattccgccattcgcgataaataatgtatttcttagccacttcgggacgtactttcatcagttccttttctaccagatcctgaatctcttccacactgatggttggagatacaaaattgctgataacccgcatggtaatttcagcaatcagtttgtcttcattgtcaattccggaggcatggaatgccttgccgattgcatttttaattttactgatggaaaagtcttcccgctttccatcacgcttaataatacaaatctcagcgtaattcattgttggaaaaattaattgttaatttaaaaaacttggctgtccttccaggcaggttttctgacttatctctcccttaaaacgccttcccgcaaatagttttgtagtggcatattgtttcagttcaacgagaattacagcagcgggtactgttgctgattttcacggcattccctcttagaaggggttaacttcaccttgtcggacggctacaaaggtataacattttgggaaactttctgtttaaaaaataaataaaagttttccaaaacggataacttattgaagatgggagggttataaaatgtaccacaatgccatcatatggcagattgttcctcctaatacaaacagatggaaaacagagtgcatatagggcaattgggggaaggaataaaagacagctccggtgatgtaagacactccttcgccgattaaccaataaataaaaacaggaggtacatgttggcagagcggcttgaaacctacaaaaatgctgcatcccatggctatatagcaaattgtttccaggttgctatgttctttcaggttacaaaaacatagaatgatcccggcgagggcgcatagccatacgaaactaagaattccccatccccaataatctgcttcccgcaaggctatcagcatgatgggggaatagcttcctgcgatatgcagataaatcgaagcatgatcgaatttgcgcaacacttcgcggtgaggagatggtttgctggcatgataccaggtggagctgatataggaagacagcataccgaatagatagagccacatgccacctgttgcccacggattgccacttttcatggcagtaagcaacagataaccgccgccggcgatacctatcaggataccaacaccatgtgacagggtattggtccactcttctcctttggtatagtgtatggtcaatttcttataagtttttgggtgttaatcccatgctttttgctttcttcaacatgtgttctaaagcagcatcatgttcattagggatgattccatccagtatggcatccttgatagaacttttcagactgcctatttcacggcagggctgcaggtcgaatatccgcataatttcttctccgtctaccggaggttggaaattgcgtatccggtctttttcttccaggtctttcagtttctggcgtaccagtttgaagttatccaggaatttttgttttcgtgcttcattttttgaagtgatgtccgcttcgcacagcatcatcaagtcgtcaatatcatctccggcttcaaaaagcagacgtcgcacggcggaatcagttactacatcatctgcgataacaatgggacgcatgtgcaggctgactaacttttggacatatttcatcttctcattcatgggcagtttcatcttgcggaagaggtccggaatcattttctcaccgataaagttatgattatggaaagtccatcctatacgtggttcccagcgtttggtacgtggcttgcctatatcatgcaacagagtggcccaacgtagccataggttgtcggtatgtttggaaatattgtccacaacttccaaggtatggtagaagttatctttatgggcacggccgttccgggtttccactccttgcaacgctaccagttcaggaaaaatcaaaggtaacagtccgcagcggtccagttctataaagcctttggacggtatgggggcgagcaagatcttgttcaactcgtcggcgatgcgctctttggagataatatgaatgcgttccttgttacgtgacagtgcttcgaaagtggtgtcatcaatatagaaattcagttgtgtggcaaaccggacacaacgcatcatgcggagcggatcgtcactgaaagtgatgtccgggtccagcggcgtacggatagttctctctttcaaatcgtccagtccattaaaaggatctaccaattcaccgaaacgtgctttgttcaggcacactgccatggcattgatcgtaaaatcgcgccggttttggtcgtcctccaaggtgccgtcctctactacgggcttacggctgtcatggctgtacgactctttacgggcaccgacaaactccacttccgtgtcatggtatttaacttgtgccgtgccgaaattcttaaaaacagaaacgtgtgctccgcgtcccagcttcttgccgagggcttgtgccatttcaattccgcttcctactactacaacgtctatatccttagagggacgtgccaaaaatatatctcgtacataacctcctacaacgtaacattccaatcccagttcgtctgccgtttcggagattaacttgaatatcttattattaaaatgttcttttagttccatattcatcttaaagaggggcaaatttacgattttttgcgcaggataaggagaaatcacgcaattaaattgtatttttgcctgcatataaaatgatcaagtacatgaaaaagataggattagtagcattatttgccttgttgctggccggttgtgatgatggcggcgagaagaaagcgcaagaaaatttgcgtaaggctgaagcggctttggaaaaagagaactttaatgaggccaaattgcagatagacagtatccgcatcctttatccgaaagcgtttgaagccagaaaacagggagtcaagctgatgcagcaggtggatttgaaagaacagcagaaaagtctgatttacctggatagcatgatggtggtgagacaagctcagctggattccgtcaaaggtaattttgttcttgagaaagatactgcatatcaggaggtgggtaactatttttatcctacccagacggtagaaaagaatataggccgttcattcttgcgcggacaagtgaacgagcagggggaaatgtcccttacctctatttattgtgcaggaggcacgttgcatcacacggcggtgaaagtgagtgtgggggatacctttgccgaaactcccgcctcgaaagacagctatgaaaccactgacttgggccgtgcaatcgagaaggccgattataagatgggggaagacggcggcgttatcgcttttattgtagcgaacaaagataagaatattcaacttcagtttatcggagaccgtacttataaaacggctatgcaacccaatgaccgtaaggcgattgcagaattaacagaattggcgcgcatcctgtccggcatggaacaaatccgtaaagataagaaagaagcgaacttgaaaatagagtttgtaacccgcaaaatgcaggaacaggaggaagagaagtgatgtgaatcggaacacaaacaaagcggattttgaaaagattccccaaagtccgcattgtccgtgtcccttgtttcatgtatagcccttacaatcgcttcaaggccagcttgatcactttctctaccggggcggcaggctcctctttcagtatggcagccactaccttttgtgatgcggcttgtgcgaatcccagcatggtgagtgcggagacagcctcgtcatgaatttctgtattggccggattggcaaacatttcactgttcactgtttccacgcccgaagtggcgatcttgtcctttaagtccactatgatgcgttgggcagttttcaggccgatgcctttcaccgttttcaataacttgtcattaccggaactgattactccgcacagttcggaaggggataaagccgatagaatcatacgtgccgtgttgccgccgatgcccgatacggaaatcagtaacaaaaataactcccgttcctgcttggtcgagaatccgtagagtacgtaggcgtcttctcggatcgcttcataaatatataatttcgtattgctctgattctgaatggccgaatacgtattcaatgagatattgatgccatatcccatcccgttacagtctaaaactaccgttgccggagtaatctccgcaatgtctcctttaatatattctatcatggttgtttcatttgaaaatttacagttctttgcaaaaataggacatctatcttttaaattataagttcggcaagaatatttttaaattattaggtcgtagtgaacaaaaaaatgaggcaaaatgtttatttttgcagcgaattaacagataatagtaaactaaacccaataaaagatgagaaaaataagagcggccgtggttggatacggtaacattggtcagtatgtagtggaggctttggaagctgctcccgattttgagattgcaggtatcgtccgtcgtagcggtgcggaaaacaagcctgccgagttggaagcatacgctgtggtgaaagatataaaggaattgaaagatgtggatgtggctgtgctggctactccgacccgtagcgtggaaaaatatgctaaagagattctggcaatgggtatcaatacggtagatagtttcgacattcatacacaaatcacttctctccgccgttcattggatgagtcggcaaaggccggtaaggctgtcgctattatttctgccggatgggatccgggaagcgattctgtagttcgtacactgttggaagccatcgctccgaagggcattacttataccaatttcggtccgggacgcagcatggggcattccgtagcagtccgtgccattgatggagtgaaggatgctttgtccatgactattcctgtgggtaccggtatccatcgccgtatggtgtatgtggaattggaggaaggtgcggacttcaagactgtggaagccgccatcaagtcggatccttattttgtaaatgacgagacacatgtaaaacaagttccatgtgtggacgatttgaatgacgtgggtcatggcgttaacctggttcgtaaaggggtatcgggcaagacccataatcagttgttcgagtttgacatgaagattaataatccggctcttaccgcacaggtgctggtttgcgtggcacgtgcctccatgaaacagcagcccggatgttataccatgattgaagttcctgtaattgatctgctgtgcggcgaccgtgaggaactgattgcgcatttggtataaagaggtttcctcaaaaagaacgatattctgaaaatctcttctccgttttatttcggagaagagttttttttatttcctttgtgctcataaacaaagaaatagaacaatgatagcaagtattgtatgggatgtggatcctatcttatttaaagtaggtagttgggaagtgcgttggtatgggctgatgtggggccttggtttcatattagcttatgaaatagtaagccgtttattcaaaaaagagaagtattcggaagactgggtggacaagcttttcgtctattgcatagtcagtacggtcattggcgcccgtctggggcattgtttattttatgaatgggactattatagcgcccatcctgttgaaatattcaagatttggaaaggtgggttggcaagtcatggaggggtgtttgccatcattctggctctgatgtggtattcaaaaaaagtaacccggaaaagtgtgtggtggttgtttgaccgcatgatacctgctgtggcgattgtctgcttctgtatccgtttgggtaatttaatgaattccgagatattcggatatcccaccacgttgccttggggatttgaatttgtccgttcccgggagtggcatcagctgtatgaaggtttgccttgccatcctactcagatttatgaaatgctgtattgcctggttgccggtgtaactgcctgggtgatgtaccatacataccatttacaaaaaagagtgggattaataaccggagtaagcttgcttatattttttggcactcgttttgctctggagtttatgaagaatccgcaggttgccgaagaggcggatatgacttttaatatagggcagtggctcagtgtgccgctgattctgctgggggcgtatctcatagctaccagccgtacccggaaagaataaaggttccgggagggggggagcaaatgaaaggacgccttttcagctttccggcatcgccctgtatatcacgtgcggggcgcgtccgtctctttctattttcttttcattgctccattggcgtagttcgctgccggcttttgttttcagcaaccctgtcaaggcacaatattccttgcaagtgataatggagtgctctttcagataattcgtcagccgtacaaagcgttcttctgctgaatatcgggtggaggaggtccggaaaccatattctgcccgttccagctttcctttgcttcgtacctccttacgaaatttccgggtgggtttgaactttatgttgtcaaaatgtaccgatgcggctcgtatctcgcttttgtccgttaccttgcggcaagtcagtgtggccgagaaagtacccagttctcccagttttacgttataaccgtctgccaggtaattggcgataatgctttccaggtcacatagcagaccgacgacggtcccttcgtggacggtggaacgccgggcaatgtctttagccaggtctttcaggctttttgtgcccgatactacaatttgtggatacagggtgggctgttccttctctccctgtatgtcgggggaggttttgaaatcatactttgctgccatgtttaatgctttttaatagggagattaagtcgtttcttgctgaacgctaaggggattctttctattaacttctatagacgcaggcaatggaccgtacggtttactgtagtggactgtacggtctgctatagtggattgtacagtctgccatcggagtctgtcttagtattcaggacaaaagtacttaatcatactggaaaaacctattaattcataggagaaaagagcttgtacgggcaaattagatgttccccttgaaggtttgagggattttcctttcattgtggcgtctttcttttcagttggtgttgttgtaaaggtaagtgttttatgctgattaccggcatacttcggatagaaaaagaggaattgggaatttttttctcttgcttgcctaaaggcgggctgatagtaggctgaaggataatccttcaggtgttttcttcgatgaaatggggaaaaaacagcaaaaactgaaggctgaaggaaaattgggatgaacttgtttttagaggtgaaaaggcctatggttcacgagaaatgttacataatccgtcacttttgttgcaatgaaacaaaaatgccagcagctgtaacaaatgttttatagaggttgccggctgtcccctacctttgcctcagaaaaacttctaaaaacatttaatgctatgaacaaaaatcagcaaaagaaccggatgggcgcggtcattattttacttgccgccgcttgcttgaatggttatgcacaacaagattctaccaaagtggcctctaattcgaaagaggaaggcaatcgcaatgtcatgttgaatgcggctagtgccaatggtcctcgtgaaatctctatcggtctgcccggtggtgatgtgaatgtactcgaaaatggtcttcctgtagtatataattcgaatcctcataatgtaaacacgcattggcgcggagacagcagcttgggacataccggattgctgaagatttccgaaacagcgattactaccggcaatataggttatgctgtcaattcatttacggaactcggcttgaataaagagaagaaaatgaatggcgtgctgaactacggcaccaatcatttcggtaaacagcaatttgacttcaatctgaatggaagcatcggaaaagattggttttacagcggcagtatctatcagaattttgatccgggttcgttcaaactacgttttgcacaatatcaggaccggactcagatctataagtttgctttgactaagttctacaatgaaggacgtggacagctctctgccatctaccattacagcaacagccattggttgtccaatgctaccaccggtgcaccatttatttatgtaggcgatgggagtgtgaaggagattcccggtttcggtctcggtacttcttcctatctgcctaatgtatcggatatggtttatatggacatgcgtaccggagagatgaaaaagatcagtctgtatgatgctacggccagtaaaggaaatcagttgacggttcttaaccgttaccggtgggataacgggttggagtggaaaatcaatatgaagtatgaccatgctttgggctcctatctgtaccagactccgatgtctatggagcagaaagtattggccgacggttatagcaccaaaggactggatggagctttgaatccttatgaaggatatgtgcagagccgtatgtcctgtttcaaccgggggaatatagatgaattcttctttaccaccgagttgtcgcggaagtatgattatatgacttggcgtgtgggggtgaacgaatggtattatgatgtggactatgcttcgaacactaccatgtacgaccatacggtagaagaatatccccaaatgttgtacagcgccgatacgaaggatattcatcattacggaaacactccttattataatctgaaccagaatgcttccgaatattacaaaggacatgaaaacaaattggctctttatgctactcacgattgggatatcactgatcaatggaatgtgtattatggcgcacgctttgagtaccagcgtctggcaggaaagaacctggcggtatataatgccgaaggcaatccggtaggccgctttgccggttatcatatcggggcagttgcggccgatggtacgaagatagctccccgtcatttcagctacgattggttgaacatggctttcacggcggccgctacttataaaatgacgaagcaatttggctttaccgccgattttacctacaatacccagcgtccgaatatgtcgaactttgctcctgccgagatgccgaatgtagataagattacgattcctttggggcgtgcgggtatttatttcaataatgactggattagcctgacctcattattcagttacattgccaagactaacaacaactctaccttgaacctgattaatccgaacaatgataaggatattaaggcggctgcattgagttatgatattgaaacaataggatggacgacggatgcagttgtgaaacctttcaaaggatttgatttccatttcctgttcacttaccaaagcccgaagtataagaagtatgaaacgggagtgacttttagtgacgggacaacatcgggtatcaatgccaccggcaatatcgttactgaaattccgaaggtgctgatagagctggaccctagttacaacattaccaaagacttgaaggtatgggcaagtttccgttatttcagcaaaacgtatgcgaatatcaagaatgcttattacttcaacggtcgttgggaaacattcggtggaattaactggaatgtaaacaaacatctgtccttaagcggaactgtgataaacttcttgaaccagaccggtgctaagggcagcatctcgggggcggaattggttgataaggaaaatgcggcagcatataatggcgcatggatggcaggtagctatatccgtccgttcaccgtagaatttgcggcgaaaataacattctgattttaataataaaacttttaataccatatattccatgaaaacaaatcttgttaaccttgtattaggtttagcctttacagcaggcacagtttcctgtcagtcacaaaaaaataatctggtgttcgaacatcagggggatacagtcactatcgtgcatattgctcattccgctaaatatttgttgcttccgattcaggaaggcagtaaggaaggacaggtgaaattggaaacaggcagtccggctgatactgaaatggatattcgtctagctatcgacagtgtagaatattatgtacctttcgctttgactcaagatgaggggggcgctacggtgactatccgcaatgtggccgctgatgctctttgttgggacagcattaaagtctcggatacatttgatacaacaaacagagataaattccgtcctctttaccatcacactccgctttatggatggatgaacgatgccaacggactggtttataaagatggtgaatatcacctttatttccagcataatccatacggctctatgtgggggaatatgcattggggacattccgtgagcaaagacttggttcattgggaacacctcgacccggcgattgcccgtgatactttggggcatatcttctcgggaagtgctattgtggataaaaataacagcgcaggctacggtgagaatacaattattgctttttatacttcgcaccgtaatgtacccggtagacagagtcaggtgcaaagtatggcatacagcacggacaatggacgcacttatacaaaatatgaacaaaatccggtccttactccgtttgacgggctacagaatttccgtgatccgaaagtattctggtatgagcccgaacagaagtggattatgattgtcagtgcggacaagaatatgcgtttttattcatctgcaaacttgaagcagtgggaatacatgagtgaatttggagaaggatttggtcctcagcccaatcagttcgaatgtccggatttcattcagttgcctgtagatggtgaccggtctaagatgaaatgggtgatgattgtaaatatcaatccgggatttgtttatggaggcagtggtactatgtattttgtaggcgattttgacggacatcggtttgtatgcgatacgaaacccgaggtggtgaagtggctcgactggggaaaagatcattatgccaccgtttgcttctcaaatacagacaaccgtatcgttgctgttccttggatgagcaactggcaatatgctaactatactcctatacagcagttccgtagtgccaatgctttgccacgtgaattgagtctgtatacaggtgaggacaagcagctttatctgagtgccgcaccggtaaaagagacggaaaacttacggaaggattctaaaaaactggatgactttacagtgaatggtgagaagcgttttgaaacactttttgaaaataatgatggcgctttcgaactggaactgcaattaacatcggcaggtaaagaagctggttttgaattgctgaatagtctgggtgagaaagtgaggatttatctggatgctgcggaaggacgtgtggtaatggatcgggcggaaagcggtattgtagactttggcaagaaggtaaagccgcatgatttggataccgaagagagttatgctcggtataaagaagtgacggtgaactataaaaatgattttgctttgggtacttgggctccgataaacaccgcgaaaggacataaggttcaagtgtttgtggataatggaagtgtggaactgtttgttgacggcggtcgcattgccatgactaatctggtattcccgaatgaaccttataactccttacgtttttatagtgaaggaggggagatgaaaatctcagatttcacaatatataaattaggtctataaataggtcaggtgaataagatgaagaaataaaaaatgaaaaaataaaagccatgaataataataaaaacctatatgccaaattaattccggtgatgctttgtttcttcgccatggggtttgttgacttggtggggattgcgtcgaactatgtaaaggctgacttggatctcacagactcgcaagccaatgtcttcccctcactggtctttttctggttcctgattttctccgtacctacgggtgttctgatgaataagatagggcgcaaaaagacagtccttttgagtttgataatcacttttgcttctttattgattcctgtttttggagacggctataccctcatgcttatttccttctctttgttggggatcggtaatgcattgatgcaaacgtccttgaatccgttgttgagtaatatcattgccggggacaagctggcaagtacattgactttcggacagtttgtaaaagctatagcttcttttctggccccttatattgccatgtggggagctactcagaccattccttctttcggattgggatggagggtgctgtttcctgtctatatggttatagctgttttggctattgccttgttgggttccacatctatcgaggaagagaagcccgataaggcatccggtttcaaagcctgtttcgctctgttgggtaaaccgtttattttgctatccttcattggcatcatgtgtcatgtgggcattgacgtaggtaccaatacgactgctcccaaaatattgatggagcgtttggatatgacattggctgaggccggttttgcgacaagcctttactttattttccgtacggtaggatgttttctcggagcatttattttgcaaaaggtttctgcgaagtccttttttgcactcagtgtagtgtttatgttactggcaatggcgggactttttattttccatacggaaacaattatttatatttgtattgccatgattggtttcggtaactccaatgtgttttccattatcttctcgcaggcgttgtttgcgatgcccgataagaaaaatgaagtttccggactgatgattatgggcttgttcggcggcacggtatttccgttggctatgggagttgccagtgacgcgatggggcaaagcggtgctgttgccgtaatgactgtaggagtgatttacttgttattatataccttaaaaataaagaaatgaccatgaataacattattgtaggaatgggtgaggcactatgggatgtgctgcccgaaggaaagaaaattggtggtgctccggcaaacttcgcttatcatgtatcacaattcggtttcgacagccgtgtggtcagtgcgattggtgatgataaattgggtaatgagatacttgaaaattttgatagcaagaaactgaattatctgatagagaaagttccttatcccaccggaactgtgcaagtggagctggatcctaatggggtacctatgtatgatataaaggaaggggttgcctgggataatattcctttcactcccgctttggaggaactggcccgtaatacccgttcggtatgtttcggttcattggcacagcgcagtgtcgtttcacgggagactatcaaccgtttcttggataccatgcccgacggcgagggacagtgcaaaatctttgatgtgaatttgcgtcagggattctatacgaaggagattctttgcaactccatgaaaaaatgcaatattctgaagattaatgatgaagaactggtcacagtgagccgcatgttcggttatcccggtattgatttgcaggataaatgttggattctgctggctaaatataatttgaagatgctgatacttacttgtggtgttaatggcagctatgtctttactccgggtgagatttcatttgtagagactccgaaggtggaagtagctgatacggtgggagccggtgattctttcacggcaacgtttgtggcagccgtgttgaaaggaaaatcggttgccgaagcgcataaactggcggttgaggtttctgcttatgtatgtacacaaaatggggctatgcctgaattgcctgcccgtttgagggaacagttggttgataacgggtaaacctgctaaggggcgttatgaaagaagctataggattttcaggcatattatagatgcctgaaatccattttaaatgtctgaagaaacttttcgaagaaacaggaatggagtcctcgatgatttttccaacgtgtgtggtgctctttttccagcagatgtttgtttcattagcggttaccttttatctttgtgtatccataaatattttgaggaacatgaaaaactatcttttattgtccattttatgcctcgccggaattctgatgtcgtgcactcagaagcatacgcgttatcgcatcggtgtttcgcaatgcagtgatgatgagtggcggcacaaaatgaataatgaaatagttcgtgaagctttattctatgatggggtagaggtggagatacgtacggcaaaagacaataaccggaaccagatagcggatatcaaatattttattgataagaaagtggacctgcttattgtcgctccaaacgaagcggcagccattactcccgttgtggagaaagcctatcggcagggaatacctgtggtggtgattgaccgtaagattctgtcggacaagtacacggcttttgtgggagccgataattatgagattggaaaagatgtggggcaatacattctcaaccgcctgcatggaaaagggaaagtcttggagataacagggcttgaaggctccacgcctgctatggaacgccataaggggttgacggatgtgctgaaagaagagcccggaattgaaataactgccagcgtagatggagcctggctgcaaagtgtggcaggtgagaaaatggactccgtgtttcaaactaataagaatatagatttggtgtttgcccagaatgaccgcatggctatcggggcctatttgtccgcccgtcagcaacagttggaaaaggaaatgttgtttgtcggcattgatgcgctgcccggtaaggaatatggagtggaacagatcataaacggggtgctggatgctacatttatttatccgaccggaggtgacaaggtagtacaggtggcgatggatattttggagaaacgcccgtatgagagagatactaagttatcaacagctttggttgataaaacgaatgcccgggtgatgcaattgcagacagaccacattaccgaacaggatggaaagatagaacggctgaataatcaggtgaacgaatatctgtccagatactctgcccaaaccatgtttctgtatgcctgtctgattattctgttattgtttgctgccttattggcgattattgtccgtgcctattggacaaagaaccggatgaatatggaactgtcccgtcaaaagaaaaaattggaggaacaacgtgaccagctgattagcctttccaaacaattggaagaggcgacccatgccaaactggttttctttacgaatgtctctcatgatttccgtactccactcactttggttgccgatccggtggagcaactattggaagataagacattgactcccagacaacaatccttattaaaggtggtgcataagaatgtacatatcctgctgaggcttgtcaaccagattcttgattttcgtaagtatgaaaatgataaattggaattggtaagagccaatatgaatctacgggtgcagttgcaggaatggagtcattcattccaaactttggctttgaaaaagcatatccattttgtattggaggtgaatgatgaccgggcagattatctgatggcagtggatgccgagaaaatggaacgtgtctatttcaacttattgtccaatgcgtttaagttcacaccggagaatggaaccattacggttacactttctactttgacgaaggaggaaggtgggagatatgcccgtctggtagttgctgacactggttcgggaatctctgtccaacatatccggcatatcttcgaccgcttttatcagattgatgtaaaccatgcgggttcgggtatcggccttgccttggcaaaggcttttgtcgaactgcacggtggagagataacggtggatagtgtggaaggaaaaggaactgtatttacagtggatatccctatgacagtagtggaagagccgtctgcagacctcgtgcaggaaccgcgcattacacaacagacggtggtggaggagctggaggatatggaaacagaagagcagattccggatgagaataaagaatgtatcttgataatagatgataacgcggatgtgcgtgactatgtgaagtcattactaaaagaagaatatacagtgatagaggctcccgacgggcgtgccggattaaagaaagccatgaaatatgtgcccgatgccataatttgtgatgtgatgatgccggtgatggatggattggagtgttgcagaaagttgaaaacagaattgcagacttcccatattccggtgatgttgctcaccgcttgttcgttggatgaacagcggatacagggatttgagtgtggggcggattcttatatctccaaaccctttaattccaaactgttgctggtacgtcttcgtaatctgatggataaccataagcggttgaaacaattcttcggggataagactactttatctaaagaatcggtaagcgacgtggataaaggctttgttgaccgtttcagggaactgatagaagaaaacttggcggattctgaattaagtgtggaagatttaggcagtaagatgggattaagcagagtgcagctttatcgtaagattaaggcgcttaccaattattctcccaatgaattagtgcgtattgccagattaaagaaagctgcttccttgctggcctcttcagagaaaaccatatccgaaataacgtatgaggtaggttttacttctccttcttattttacaaagtgttataaggaatatttcggggaaagtcctacggacttcttgaaacgcagaggataagaactatatcccccgtagggagtaatgcttacgctctacgggggatgtatattttaaatcagcgttgataaatctttctcagctacgaaagagagattattaagaataatcacttctcttgctctgtcgggattatctgtgcggaaaatcaatatgcctttgtttcctaacaagaaggaatacagataagtgattcctattttggcttcactgaaaatggtgatagcgtccgctgcccgtcccggctgattatccagtgtgatggcgaacacatcagagagcgccacggatattccggcctctttcagtgtttcgtatgcgcgtttgggttccgagcagatgatacggtaaatgccatattccactgtatcggcaatagtggaggcaatcagttgtatgcctgcttcttttaataagttcaataccctttgtagagtccccgatttattttcaatgaagacggataattgttgtatagtcataaacttattttttaaaaggttttacgtaagtctttcacgcggacagctttgccttctggtttagggagtgttcctttgggtaccagtttcacacgtggggtaactaatatttcatctttcagttggcgagtgatttcacgggtcaatgattgcagacgcccgtaatcgtcagtgaacagttggcttaattctacttctacggtcatctcatcatttgattcggcagtttcaagtgtaatcagataatcactgcccaattctttgaattgtaacaaaattgtttcaatctgaatggggaagatattgacccctttcaggataatcatatcgtcactgcgtcctttcattctgtccagacgtttgtgatgacggccacaaggacattcgcccggcagaatacgggtaaggtcacgggtgcggtatctcagtaaaggcatcgcttcacgattgatcgtggtcaacaccagctcacccacttccccttcgggtacgggttccaaagtgtcggggttgattatttctacgatataataatcttcccatatatgcaggccgttctgttcctgacattcaaaagccacaccgggaccgcacatttcggacatgccgaaagaattgtaagcttttacgcctaacatatcttcgatgcggcggcgttgttcttcagagtgaggttctgctccgataatcaatgtcttcagtttggtatcacggcgagggtcaatccctatttcctgcattacctcatacatacgggctgcatagctgggaatggcatgcagggcagtggttccgaaatctgagataaactttaactggcgcttggtgtttccggcagcggcaggtacggttaacattcccagcctttcggcaccatattgaaaacctagtccgccagtgaacatgccataaccggaagagttttggaaaacatcacctggacgcaatcctaccatataaagacaacgggcgactgcattggcccattcgtcaaggtctttctgagtatggagaatgacagtggggtttccggtggttccactggatgagtgaaggcggacggttctttccaaaggtacggatgccagtccgaagggataggtatcacgtaaatcttgtttggtagtaaacggaattttttgtaaatcatccagtgaacggatatcttccgggctcagatgactctcggcaaatcgttgtttatagaaaggggaattcatgcaatgacggacagtcttttgcaagcgttccaattgcaatttctctatttccggccgtgttagagtttctaactctttgtgtaaatacatagcattttctgtttagttggttattagtccgacaaaaatagaaaaaaatataatgcggttgggaataagctgacaaaatatgtatctttgggggattttaatttaaaaatgtgatgaaaaagactttatttataataggtatgttgttgtgcgtgttttcgttgcacgctcaggatatgaaaactctctttatcgctatgcctgattcgatagctcctttattgacaaaggtaaatcgcgaggattgtgtggattttctggcaagtaatatgaaggcggaggtcaagaaccgttttggaaaggtgtccgagctgaaaaagttgactgacgattatttgtttctgcagaccacgggaagtagttctatggaaatgaaactgttgcccttgaatgattccgtaaaggtgatttgtgtgatcaatacagtttgtggtccggtttgtgatagtgaaattcgtttttatagtacacggtgggagcaactggcggaaagtgattttatccggcttccttctgtcgaggctttttatctgccggtagatacgctgactgatgaggcttatgttgcgattagagagaaagcagatatggaactggtgaaagctactttgtctgaggacaagtcaatcatctcttttacttatactactccggaatatctggcaaagacagaaagagaaaaattggcagtgtatatcaagaaagagccggtgatatatgaatggaaagaaggaaagtttagtgcattcccctaaagggagtgcaatgtgtttcaatataaaaaggctgcaaactcattgagttgcagcctttttatattgaaacttatgtgtaagttacaatttactttttcatacggttaccgtagcggctcatgaacttatcaacacgacctgctgtatccaccaatttagatttaccagtgtagaacgggtgtgatgtattagaaatttccagttttaccaacggataagtttcaccttcgaattcgatggtttcttttgtgctacaagttgaacgtgacaaaaatacatcgccgtttgacatatctttaaatacaaccggacgatagttttcaggatgaagaccttttttcatttcagtatattcttttattgttattattttacttatttggtaaacaaattgggtgtaatggtccattttggaccgcaaagatacggcttttctttgaaatagaaaaaacttcgggctattttttcttctaaaccccttattttcttcttttatagtattgtaaggtagacattacaatgtaattagtttatgcgttcaagcgaagaaaatagttaataaaatcattttttatgagatatttttggtgtgaacttgccatagttagcgcatttatgattacttttgcagtggaatttaattcactaacaattataaatattagaacaatggttaattacaaagatttaggtctggtaaacactagagatatgtttgctaaggctatcaaaggtggatatgcaattcctgcattcaacttcaacaatatggaacagatgcaggctatcatcaaagctgcagtagaaacaaaatctccggttattttgcaggtttcaaaaggtgctcgtcagtatgctaacgctactttgttgcgttacatggctcagggtgctgtagaatatgcaaaagaattaggttgtgcaaaacctgaaatcgttcttcatctggaccacggagatactttcgaaacttgcaagagctgtatcgactcaggtttctcttctgtaatgatcgacggttctcatctgccttatgaagaaaacgtagctttgacaaagaaggtggttgactacgctcatcagtttgatgtaactgtagaaggtgaattgggtgtattggccggtgtggaagatgaagtttcttctgatcatcatacttatactgaccctgaagaagtaattgattttgcaactcgtacaggttgcgactcattggctatctctatcggtacttctcacggtgcatacaaatttactccggaacagtgtcacattgatcctgctacaggtcgtatggttcctcctcctttggcattcgaagtattggatgctgtaatggaaaaacttccgggattccccatcgttcttcatggttcttcatcagttcctcaggaagaagttgagacaatcaacaagtatggtggtgcattgaaggctgctatcggtatccctgaagaagaattgcgaaaggctgccaagtctgctgtttgcaaaatcaacattgactcagactctcgtctggctatgactgctgctgttcgcaaagtatttgctgaaaaaccagctgaatttgaccctcgtaagtacttaggtccggctcgtgacaatatggaaaaactgtacaagcacaaaattattaacgtgctgggttcagacaataaattggctgaataattaattcaccctatataaacaggaaaaagctgctttctttattgaaagcagctttttttgttttaagactggtttcggtattgaagaggggatttgcctgtatgtttcttgaaatagcggccaaaaaaagattggtcagggaaagataatcggttggagatctcttgaatacttagggacgtggattgtaataatgctttaatctcaagaattacatgtcggtcaataatgcttttggctgtgttgccggatacgttttgtacgattgtggacaggtaacggggagtgatgaacagttcggctgcataaaaagatacttcacgttgggtggtacaatgtttatgaatcaattggatgaaacgtttgaatatctcttcctgacgatttattccttcggtctttttttgcaggaacaggtgttgggtcttgtcatagaagtccagaatgaagttttgaatgaaatttttgaagatctgaatgcggaaactattatccctgtcttcataaagatctttcatgaccaagctgagcccgatgaatggttttacacgttcttcagggatgacaatgcatggatgctcttttagaaagtgaaagaaggagggatccagacgtgaggtgatctccctgaaaagggtgtcggaaaaaacaatataggaaacggtaaaatcatggctggcgcaggtacaattgaagatactgccggggagaagcagaagttgggtgttctccgtcacttcgtacgcctgcaaatcaatttctatgtgggcttttccgctacggcaatgaaaaatagatgcgtctgctaacttcataatctgattggagcatatatctatactttcttctattccggtgataaacggttcattctctggtaaactcaatatttccatgtttattcttgttttgatgcaaaattaactattatttttgttataataggaaatatgttctgaatttgaacaatggtgactaataattgaatgtgtcggcttgagaaattccatctacctttgcgtccgaaattaacctcaaatccgcaactacgcgcctaatatgatacagaagcgaaaagaatctgcatcgttagtaaaaagggggcacagtgcatcgaatgtcaccataaagacatataaatgccccttaccccaccatgcgacttgaggcaatacgcaaaatcacgactataagttgtcggtgttatccaaagtcattctggaacacattggcataagcattgttgcatgaatagatattcagcacatacttccttgatgtcctgacccatttggctggcacagagatgaacttaaagacaaacgtcttgatgcggcttgttgctttgagtccgaacctcttcacgtcaagcctcgccatgatgaatttatagaagttgcgtatgagtgccataagcagaagaaacaccgtgttttctcccataaaggattttggaagcctgttccagccgaatccgttattcatatcatcgaagatgcgttccttccctccacggaggttatagaattcgacaatctctttctcggaagactcgtagtcatttgtaaggatgcagcggtaggtgtattctccttcccacaggtcgagttcgccgtctatccgcttctgtctttgaatcacaagacggtatgccttccctttccatttctcgatgagaatggaggccagctcaaactcaatgccgcccaattccactttcttccaacctctgagggcaaagatgtcattgtagagcgaactgcatcggttagcacggatatagaaggtcttgcagtgtttagcaatctcttccactatctcttcagaacacgagccgcaatcagctctgaaacggttgataataagcttgttttgttcaaacctttcaaagaacctcttcagcgtgtccttctggtggaaacggacatttgtgttgccgtcgctgttctcaatgccgacaatcaagttgccaataaccgccacgccagggcgataaccaaggaacttcttgtatgtaggcttcgcatcaaacttctcagcctctatgaactggtggtcgaagtcaacgtcatacccctcgccctctttcagctgccctgtggacaataggcaattgaggagcagtgtattcagcttgtctgccgtgttgaagtcgtaggtcttgccagtgtcggatgtgtaggaaatgttatcctgggtcagttcctttatggctctaagaatcgtgtcggcactgcatgtgcgaagtgtcggatgaagcgaaaggtggtacatcagatgagtggtgacatcctcgatgcatgagccgccacaaaaataaacgctcataagcgaacggatgatttcgctgtattgataaccatacagcctgcatctcataccgagggttgagtcgattacagatgagagtctggagtcaaattgctccattattgaaaatattcctccaaaaggagtgagtttctcggatttaattgctacctttgccatgtctgtcgggtttgatacatattttgatttgcaacactaagataggtgaaaaatctgacatggcaaattcctgagcaactttttgttgctcaggtacttaaaaagttatatttgtaatagtgttgcggaattaaggattaaaagattggaatatgatgacattgaacagaaaatggatgcgactaatagtattagttggttgtgctgctttgacagcgtcgtgtaaacaggcgcctgttgcacaaatggaggcggaatatgcggtattgaaagtatcgccgtcggataaagttttgtctactacttattcggctacgatccgcggacgtcaggatattgatatttatccgcaagtttccggtttcctaacacaactttgtgtggaggaaggacaggcagtacgtaaaggacaaatcttatttattattgatcaagtaccttataaggcggcattggaaactgctgtggctaatgtggaatcggcgaaagccggattggcaacagcacaattgacatacgatagcaagaaagaattgtttgcaaagaaagtagtttctgaatttgatttgaagacggcagaaaattcatggcttactgccaaggcccagttggcccaggcgaaagcgcaggaggtgagtgctcgcaataatctttcgtatacagaagtgaaaagtcctgcggatggagtgattggtacattgccttatcgggtaggtgcattggttagtgccagtttgccacaaccgttgactacggtttctgataattcggatatgtatgtttatttttcgatgactgaaaatcaattgttggctctgacccgtcaatatggttccaaagcagaagcgttgaaaaatatgccggaagtggaactgcaattgaatgacaagtctatgtatggcgaaaaggggcgtattgaaaccatcagtggggtggtagaccgtaatacgggtaccgcgagcctgcgtgccgtattcccgaataagaatgggttgttgtatagcggaacatcgggaaatgtgatccttccggttacgatgaaaggaagtttggttattcctcaggctacaacttttgaaattcaggatattacatatgtatataaagtcgtggacggcaaggcacaatcagctcctgttagtgtgacccgtgtaaatggaggacaggaatatatcgtgaacgatggattgaaagagggagatatcattgttgcagaaggcgtaggcttgctgcgtgaaggtactccggttaaagtaaaacaaaactaagaagaaaatgaatttaagaacctttatagaacgccccatcctgtcggctgttatttctatttcgatagtagtagtggggattatcgggttgttcactttgcccgtcgagcaatacccggatatagctccgcctaccattcaggtaagcacttcttatttcggtgccagtgcggaaactcttcagaagagtgttatcgctccgttggaggaagcgattaacggtgtggaaaatatgacttatatgacttctaccgcttcaaatgccggagttgtagatattactgtgtattttaaacaaggaacagatcctgatatggcggctgttaatgtgcaaaatcgtgtatccaaggcgaccggacagcttcctgccgaagtgactcaggtgggtgtgactacctcaaagcggcagaccagtattttgcagatgttctcactatatagtccggatgattcgtatgatgagaaattcttgtccaactatatcagtattaatttgaaacctgcaattcttcgtatccagggtgtgggtgatatgatgattatgggtggtgactatagtatgcgtatctggatgaagcctgacgtgatggcccagtataaattgattccatcggatgtgacacaagtgttggctgaacagaatattgaatcggctaccggctcattcggcgaaaactctgatgaaacttatcaatatacaatgaagtacaaaggtcgtttgattactccggaagagtttggggaaattgtgatccggtcttcggataatggcgaagtgttgaagctgaaagaaattgccgatatagagatgggcgaggaaagttatgcctatcacggggctatgaatggtcatcctggtatttcctgtatgatttttcagacggcaggatctaatgcaacagaagtaaataataatattgatgcctttttggaagaagcaaagaaagatctgcccaaaggggtggagatggttcaggtaatgagctccaatgactttttgtatgcatctattcatgaggtgataaagaccttgtttgaggccatttttttggtaatcttaattgtatatgtattcttgcaggatattcgttctactattattccattggtggggatcattgtatccttgattggtacatttgcttttatgtccatagcaggattcagtatcaacctgattaccctgtttgctttggtgttggtgatcggtacggtggtggatgatgctatcgttgtcgtcgaggcggtgcaggcgcgttttgatgtggggtatcgttcttcttatatggctagtattgatgcgatgaaggggattagtaatgcggtcatttcttcctcgttggtatttatggctgtgtttattccggtttcgtttatgagtggaacttccggtactttctatactcagtttggtttgactatggcggttgccgtaggtatctctgccgtcaatgcactgactttgagtccggcgctgtgtgctttgttcttgaaaccgtatatcaatgaggatgggacagaaaaaaataattttgcagcacgtttccgtaaagcgttcaatgctgctttcgatgcaatgattgaaagatataagaaaggggtattgttctttattaaacgcaaatggatggtatggacacttcttgtggcctcggtagtactattggctttcttaatgaatacaactaaaaccagtttggtgcctgatgaagaccagggggttgtatttgtgaatgtcagcacggcggcaggtagttcattaaaaacgactaatgacgtaatgatgcgtattgaaaagcgcatgatggatattcctcaggtgctgcatgtgcagcgtgtggcaggttatggtctgctagccggacagggtaattcttttggtatgttgattctgaagctgaaaccttgggatgagcgtgaaggaaaggaaaatgatgttcaggctgtaatcggacaagtgtatggtcgtacggcggatatcaaggatgccagtatatttgctatttctccgggtatgattccggggtatggtatgggtaatgcgttggaactccatatgcaggataaacaaggtggtgatgtgggcactttcttcaataccactcaacaatatctgggtgctctgaaccaacgtcccgagatcgcgatggcatactctacttttgatatccgttatccgcaatggacggtagaagtggatgcgtccaaatgtaagcgtgccggtatcactccggatgctgtgctaagcacattgtctggctattatggtgggcagtatgtctcaaattttaatcgtttttctaaagtgtataaggttatgattcaggcagatccgaaatatcgtgtggatgaaagctcattgaataatatctttgtgcgtatgtctaatggcgagatggctcctctcagccagtttgtgacattgacccgcagttatggggcagaatcgttgagccgttttaatatgttcaactctattgctgtaaatgcaatgcctgccgaagggtatagtaccggtgatgctatccgtgccgttcaggaaactgccgtacaggcacttcccaaaggttttgggtacgattttggtggtattactcgtgaagagaccgaccaaggaggtactaccattatcatctttgctatctgtttcttgatgatttacctgattttaagtgcactttatgaaagtttcctcattccgtttgcagtgttgttgtctgttccgtttgggttgatgggtagcttcctgtttgcaaagatgatgggactggagaacaatatttatttgcagactggtttgattatgttgattggtttgcttgctaagactgccattttgttgaccgagtacgccgccgagcgtcgtaaggcaggtatgagtctgacttccgccgcactttctgccgccaaagcccgtttgcgtcctatcttgatgacggctggaacaatgattttcggtctgttcccgttgatggttgccagtggagtaggtgctaatggaaacagttcactgggaacaggtactgtgggtggtatggtgatcggtacgctggcgttgctgtttattgtaccttctttgtttatcgtattccaatatttacaggaaaaggtacgtcctattcagtttcagccggcggccgattggcagattcaagaggaatgtgtagaagcaaaagaagaaagacaacaccacattgaaagcaaaaacgaagagaaaaaatgaaaaaacagatcatcactctgactgtcgcagcactcacactgagtagctgcggcatatataccaaatataaacctgcaaccgaagtgcccgataatttgtatggggaagaggtggcggttgctgataccgtggataatatcggcaatctgagctggcaggagatttttactgatccgcggcttcaggaattgatagagcaaggcttgcggaacaatacggatttgcagtcagcacaatggcgtgtgaaggaggcggaagctgctatgctgtcagccaaattggcttatctgccttctttcgctctgtcacctcaggggacagcaagtagttttgacaaaggaaaagctgcacaaacttatactttaccagtcgcggcaagttgggaaattgatattttcggccgtatccgtaatgcgaaacgccaggcgaaagcattgctggaacagagccgtgactataaacaggctgtccggacacagctgatagccggtatagctaatacttactataccttgctgatgctggacaatcagctggccatctctgtccggactgaaaagtcttggaaagaaaccgtagatgcgacccgtgctctgatggaagccggattggcaaatgaagctgccgtttcacaaatggaagctacatactatactatatgtacttcagttcttgatctgaaagaacaaattaaccaggtagaaaacagtttgtcgttgttgttggctgaacctcctcatgctattaagaggacgggcacatgggacagctcttacatgttgaaggaacatttcccggtaggcatccctgtgcaaatgcttgccaaccgtcccgatgtacgcagtgcggagcgttcgttggaagcagctttctatgccacaaatcaggctcgttccgccttttatccttctattgttttaagtggaagtgcgggatggactaattctgcaggaagtatgattgtcaatccgggcaagttcattgcaacggcggtagcttcgttaacccagccactttttaataaaggtgcgaacatagcacagctaaagatagctaaagctcagcaagaagaagcaaaactgagttttcaacaggctttgttgaatgcaggaagtgaagtgaacgaggctttggtgaaatatcagacggcccgtgataaatcagcttattatgataaacaaataaattcattaaataaagctttggaaagtacctctttgctgatgcaacatgggaatacaacttatctggaagttttgacggctcagcagactctgcttaatgcggagttaactcaggttgctaaccgttttactgaaatgcaaggcgtaatcaatctctatcaggcattgggtggaggtcgtgactaatttagcatactgttatcttcaacgtgttgaagaaagagaacgctgctctccgtgaggaaagcagcgttcttttatggttgtcaaggtcctactataacacaaaccggattagattcttcattgatttcctgtaaaaagcttagctttccttcttggacaattcccggatttttatccatccattcgtctattttccctatctccaataaagtggcatactctccttcttctgtacaagtgatgggatagaaaggcatgaaatgcgtcaggtcatctgtcagccccacagtggcatcattcatataagtaatatgtttttctttgtcgtaaataccgtagaacgtttttttcttatcgtataatccttgtagagatataaagaagagatggttgggagtttccagaatactggttataacgatgtatttgtctgtatcttctttttgtcccattttctcagctgggaaatgccattgtctggtatggaaggtggtatggacagtagcttcgtgtcctttgatgtcatagattgtgtcattgaacgcttttctgaaacgtatgctgccgttactcagccaaagtgaaggctggtctataggaagaacggtcattgttccattctggtaatttatatatattaatcctcctatgttagcgttgccgggtaattgcttgaatacgttgatgctggatatctgatccatgcccatagggttacctggattggcaaattccggcaatgagtcttttatttctccctgttcgttgaagtaaagtaacgcacttgcttgcggttgtcctattccttctccataatgagcaagaataagggagtcggaaaaagtgaagtaaagggatggggaaatcttttgtggcaggtttacttgccctagataattaccttttgtgtcgtattttaccaacttgtcgggttggcgataaaagtagagattgttggtatgggggtgaataaagcagttggcattgctgtatccttttggatcttcccctttgtgcccgatgctgccaagatattttccggtttgtttgtcgaatgacaggcatcgtccgttggtagagacaaagatacggcctttagatagtttgatggaataagagttgccaatcagggatgagtctgttgtttctaaagggatataacggatctgttttcccaattgggagatctttaattctgtgaggtgttccagacttgcggcaatgtcaattgcattcggggcatttgccttgttttggggggcacaggagcctaataataggagcaggccgcctagcatgatttgcttcttcatagtagtattgttttatgaaagaaaagaagttgtttgcatggacaactccttttctttgtgtttaaatgatgttgtgtttgttatcttgctgcaaaaaacaaagagtttcctatagctattcttgcggtagcaataccttgtgcatcaggagtgacagtcatggaggttccgttttgcaggctcaaagtagctgtcccgtcttcgttcattttcacaagttcgaagctctgttcgccagaaacagcgttccatgtattgttttctttgttgtagaccaaatctacagatttgtcttctccttttttggtaatggtataaccgttttcgttggttttaaccaagtattcgccattttctccttgcactgtttttacttcaccgatagaagctgtagggttagagccgctccagaattcgatggaatttaaaaccaatacatccgccagataagcaatttcataaacagggacaatatggaaagcgagaaagataagttcgttgacaaacttgttgcttactccctgattccagtctttcaaactattccataatccgaaagaaccgatgcatgatgaaaataagacgctgccactcaacgtggcgcaaacaagaaatgttttgctttttttcatgatcaataaagttaagtttataaaaagtaattttatgacgatttcctacaataaaacgatttaatcgtcacgcaaagatagaacttttttatggaaagaggcttctctacctaaaaaactgtatctttgtaagctgaacatgaaaaactattaatcaaaaatcttataaaagaatgaaagaacaaattcaaaaaaagctcaatgactccaaggctcttcggtggagtgtgttggcgctggtggccttcaccatgctatgcggttattttttgaccgatgtaatgtcccccttaaaaccgatgcttgaaaaggagctgctgtgggatagtctggattatggtatttttaccagtgcatacggttggttcaatgtttttgcctttatgcttattatcggtggtatcattctggataagatgggagtgcgttttactgggatgggagcatgccttttgatggtgttgggctgtggattaaaatattatgctatttctactacatttgctgagggaagcactttgcttggaatgaaaacccaggtaggaatggctgcgttgggatatgctatatttggtgtcggtgtagagattgcaggtatcacggtctcaaaaattattgtgaagtggttcaaaggaaaagaaatggctttggccatgggcatggagatggcgacagctcgtttaggcactatgctggctttggctgttacggttcctatcgctactttctttggaattactgatgatgagggtgtgttccatcctaatatccctgctccattgttgctgtgccttactatgctttgtattggtacgatagcattttttatttatactttctatgacaagaaactggatgcttctttagaagaggaaggggcggaacctgaagagcctttccgtatgaaagatatttggttgattgtaaccaataaaggattttggctgattgcgttgctgtgtgtgttgttttattctgccgtattccctttcttgaaatatgccacagacctgatggtgcagaaatataatgtagatccggaattggcaggtactattcctagtctgttaccattgggaactttgttccttactccgcttttcggtaatgtgtatgatcggataggcaagggagctacgctgatgatcatcggttctgtgctgttgatttttgttcatacaatgtttgcgttacctatcttgaatgtatggtggtttgctactatcattatgattatattggggattggcttttctttggtgccatcggctatgtggccctctgttcctaagattattccggaaaagcagttgggtacagcttacgctttgatcttctgggtacaaaactgggggttgatgggtgtgcctgccttgattggttttgtcttgaatgagtattgcaaaggaccggtagtagatgggatgcagacttatgattatacacttcccatgtggatatttgcaggctttggtgtggctgcgttgttctttgctttgtggctgaaaggtgagaataagaaaaaggggtatggattggaggaaccaaatatcaaaaaataattgattgtcttttagtgaaaatgagggtatccatgcactggataccctcattttgctatataggggtgagatgaagttttagtctttatcaatcttcacaattcctccggtattaggattaaagatcactcgtgtgtttacttttttattaaaaaggttatctaccagacattccgttgttccaaattgtgtaacaggtagttctccgtcaaaataacgtttgtttggagtgaatacggtaacctgagcttttcccggaatattataaataacaccatccattttctttttttctttgcctttcggatccaccggtggcagtgtttcttggttgatgatggagatataataaggttcaccggataaattatcggcatccagcatccctagtttctttgagaaacggaaagcgactttttctttcatgcctgcttctggctttatgcggatggtaaacgatttttctgtgcggtctgttgtgccggcaaacatttgcatcatggcttgttcttgttcatccagattgtccagcatgagttttagagcagctccgtctttgggcatataatctgcttgtccgcgggttaggctgtttttgctttctcgtatattgtagatttcttttgccaccaattcagccattttagcggtagaaccggctatcagaatctcttcggtcataaaactgcgtgggtcaatacgttttttggccgtatcggcaacctttgttacaggtgctttttctataggagaggtggtgttgatagcctttatgattccttcaggagtcaattctacttgtgaggcggcacttttgtctttcagttttacagcgtatgcattgtccggatcaggaatgcctatggaatttaccttgatactgtttatttcccaatgttcttccggttgggatgatatgcctgtcaggcgcagatagcggtcggcgtattggcagaattctccgggagtgtagacaactttggttgcgatgacttgcaattctatttcggtcttaggcaaataataaaccactccttctcccatggttccgggagtatatgtactgacatcttgtgcggtgccgctcaatgaaaccagcaaccctgctgcgattaatccttttttcatatttctatattctatcatatatgtaagcaaatatagctattcttttgtaaatctgccttttgtttctgttaatttcttccatgctgcgggtaatgcgtcaataagatcacttgaggtggtccctatttctcctttttcttccgccgcaatgtctcctgccagaccatgtacgtagacccccaggcgacatgcgtcttcttgagtatatccttgtgccaataaggctgccagaataccggtcagcacatcaccgctgccggcagttgccatacctggattcccggtgggattgaaataacaatttccttcgggggtgacaactgtgctccatgatccctttataatgatataactttgcagataggcagccagttctttagtctttgtcagccgttcgtaagtatccatgcatttaccaatcagtcgttccagttcttttagatggggggtgagaatacaacgcttcggcatccggctgagccagttgcggtgagtgccgaaaatattaatggcatccgcatccaatactaaaggtaccggacaaccttgtatttgttccatcatggctaacgctgtatcttcttcttgtcccaatcccggaccgatggctatggcttgataacggtctgtatctacgggttcggcaaaataatggtcgtgtatgtctgtctgtacaatggcttcggggacagtggtctgaagtaaatcatggttgtggataggtacatggacagtcagtaatcccactcccgaacgcaggcaggcacgggcagataaaatggatgctcctgccatgccataagatcctgcgatgagcagtgcatgtccgaaagctcccttgtgggcaaatcgtttccgcggtttgatgaggctgcgaatttcttcttcctctgtgatatagtagggactttgtgctgtatcaataaagtcttttttcagttggatgtccaatagttgccattcgcctacaatgtcttcgttttcggggaaaagaaaggatagcttaggtaactgaatgctgagagtgacatccgcacgtatcatgttttggcggatgttataagtgttgtcctcacacattaatcctgaaggtacatcaatggctactacctgtgccttggatgcattaatatatttcactacggcagcaaatccgccgttcagtggtttattgagtccggaaccgaataatccgtctactaccagatgcttttctgtcaagactgggggatcaaattgtgtgcttacttcggtaaagtagaccgagccgcattcttttaaccgttcaagattagtctgacattcttccgacagttttcctttggtgttaaacagaaagacttctacgtgatagttttgtttagacaacatacgggctacggcaagcgcatcgcccccattatttcccggtccggcgaatactgcaatatggaaagaagtatcccatcggtgggtaatggcacgagtcagctcttcggctgcccgttccatcaaatcaatggaggcaaccggttctttggcaatcgtgtacttgtccagctcttttagttgggtgctcgaaataattttcatgacaatctcttttgtttgaacgtacaaagataacactatttacaaaaagaggttatgtgaatacttcgatacttggaataaaaatgttatttttgcagcaatttaataaaatagcggttatggataccattcaaatcaaagataaacgtttcactcctttcattcctgaagaacggatcttaaaagaagtggcacgggtagcgagtgagattaatcgggatttagaaggagctaatcccttgtttttaagtgtattgaacggcgcgttcatgtttgctgccgacttgatgcgtaaccttaccatccctagtgaaatttctttcgtgaaactggcctcttatgcaggaacttcttctaccggaaaggtaaaagagttagtaggtttgaatgataatattgagggtcgtacagtggtgattgtggaagatatagtggataccggggtgacaatgaagcacttgttggaaacattacaagctggaaaaccgaaagaaatccgtattgctaccttgttattgaaacctgataaattggaggtggaactggatatacattatgtggccatgcgtattcccaatgattttattgtggggtatggtttggattatgatggtttgggacgtaactatcgggatatttacaccgtaatggaatgaaatttgtacaactaaatataaaaataaaggataaaacaagatgttgaacattgtaatttttggagctccgggttctggtaagggtactcagagtgaacgtattgtagagaagttcggtattaatcacatttcaacaggggatgtgcttcgtgctgagattaagaagggtacagaattgggaaagacagccaaaggatatattgatcagggccagttgttacctgatgaattgattattgatattctggcaagcacgctggatagtttcaaggaaagcaaaggggttatttttgatgggttccccagaaccatcgcccaggcagaagcgttgaagaaaatgctggccgaacgtggacaggaagtatctgttatgttggatttggatgtacccgaagaagaactgatgacccgcctgattaagcgtggacaggaatcgggacgtgctgatgataacgaagaaacaataaagaagcgtttggttgtttatcactcgcagacggctccgctgattgactggtacaagaacgaaggtaaatatcagcatattcacggcttgggtacgatggatgctatttttgccgacattgttgctactgtcgaaaaattataataatgtgctaatgtgctgatgtagcagtccaccaaagtgtcagtcagcataatgatacatggagtacagtttcattggcacattagtaagttggaaaattagtaaattattaattatggctgaatcgaattttgttgattatgtgaagatatattgccgctcgggtaagggcgggcgaggctctgcgcatatgcgtcgtgagaagtatgtacccaatggtggtcctgacggtggtgatggcggtagaggaggtcatgttattttgcggggaaaccgtaattattggacattgcttcatctgaagtatgaccgccacgtgtttgccacacacggtggcaatggctcaaagaataaaagctttggtaaagatggtgaagacaaagttattgaagtaccttgtggtacagtggtttataatgctgaaacaggtgaatatatctgtgatatcaccgaacacggacaagaaataactctgttgaagggaggacgtgggggattgggaaactggcacttccgtacagcaacccgccaggcgccacgttttgcacaaccgggagaacccatgcaggaactgatggttattttagaattaaaactgttggctgatgtaggtttggtaggttttcctaatgcagggaaatccactttattgtctactgtatcggcggcacgtcctaaaatagccaattatccgtttactacgctggagccgaatttgggcatcgtgtcctatcgtgaaggaaaatcctttgtcatggcggatattcccggaattattgaaggggccagtgagggaaaaggactgggacttcgtttcctgcgccatatagaacgcaactctttgttactctttatggtaccgggtgatacagatgatatccgtaaggaatatgaaatcctgctgaatgagttggctaccttcaacccggaaatgttggataaacaacgtgtgcttgccattaccaaaagtgacatgttggatgaagaactgattgccatgttggaaccgacattgccggataatgttccgcatatctttatctcatcggtgactggtctggggatacagcagctgaaggatattttatggacagaattgaataaagacagcaataagttggaaggtgtccgtacggaaacaattgttcatcgcgccaaagatgttgccaaactgcaggaagagttgaaagacatgggtgaggatgaggactttgaatataaatatgaagaagatgccgatgatgacttcgattatgaatatgaagatgaggattgggacgaagaagaggaaaagaaatgaaatggctgacatcagataataaaatgttgggatatgagctgatgaaggcatatcccaacatttcttgtttttctaccacccgtcacggaggttgtagtaaggggaactacacctcgttcaattgtaacggatattgcggggacgaggcagaagatgtgaaccgcaaccgggaattgctgcgtagcttgctgcccggggaatcggtagaactcgtgattccgcaccagacccatagtgaccatgtgaaagttgtggatactattcatgtaaatactgaattggaaggagtggatgcattggtaacagacattcccggttattgcttgtgtgtatctacggccgactgtgttcctgttttgttatacgatactcgaaagaaggtagtggctgccattcatgccggatggcgtggtacggtggcccggattgtagagaagacagtttcggtcatgagcgatcaatacggttcgcaagggaaggatctcattgcttgcatcggtcccagtatttcattggaggcttttgaagtaggggatgaagtttatcaagctttttatgaggcggggtttgatatgaatcagatagcccgtaaagaagcaaaatggcatattgatttgtggaaagccaaccgtcagcagctgttgacatacggtgtgaaacctgaacatattgaggtatccggcatttgtacgtatcataataacgatgatttcttttcggctcgccggcaaggaattcggtcgggaaggatattatcgggcattcttttaggtgtctgaggaacacactcattggaataacgcagtataaaaatgaatatggaaataaaagtatcggaagaaataaagaaagcctgtccgcagtttgccggtatagccatccgtgctacggtaaaaaacactgcttatagcgaatctttgtggaaaaagatagacgagttcactgtacgctatcgtgaaatgtacactacggattccattaaggatatggttacgattcatgccactcgggaggcttataagaaatgtggaaaagaccctagccgttatcgtccttcgggggaagcgctttgccgtagaatcctgcgtggaattcccttgtatcagatagatactttggtagatctgattaacttggtatctattcgttacggatattccatcggcggctttgatgcggataaaatacaaggagatacattggtgctgggtatcggtaaatccggagaaccttatgaagggataggacgtggagagttgaatatagaaggaatgcctgtttacagagatgctatgggcggaatcggtacaccaaccagtgataatgagcgtactaaactggaggcgggaactacgcatctgctgaccattattaatggatatagtggcaaggaaggtttgcaggaagcggcagattatatgttggagctcttgaaagagtttgcagcgtccaaggatgaagaattaatttatttttaaaataagataatgaaaagcacacaattactatttttattgttcataagtgtggtagcatgggctgggagaccggctaagagtaattttaccgcgatggaagtgaaccatatcagagtcaatacccccgggctctttaatgagcgcaaaagtttctccattcatctggatagtataaaagagaatgaatattgttttcctcttcccggtggtaaagtgatttctgcatacggagctcgccgggggcacagtggaacggatataaagactaaggccaatgatactatccgctgtgcgtttgatggaatagtacgtatggcaaaaacatacgctgcttatggaaatgtagttgttgtgcgtcatgataatggattggaaagtatttatagtcataattcccggaacttggtaaaatccggagatatcgtgaaggccggtgatgcagtagggctgacaggcagaaccggacgtgccactaccgaacaccttcatttggaattccggatagatggacaacattttaatccgaatctgatttttgatatgaaaggtcgtactttgcgcaaaacggaaattgtttgtgccaaaaccggcaatagagtgatagtaaaacagaatttaacgcctaaaaaatgagacgatggatatagaaaaagcaatcactgaaggaattgtattcaaaggtggtaaatctcctaatggtaaacaagaagataaagtgaagaccaaggctaaaaagaaaagttatataacagggttgcatgggtcgggagctgccaagatgaaagctgagtttcgtaaaaaacgtgctaacagacataagaataaataggaatgtagattgaacttaacattcagtattttattaataattaactaattatcctctcttttgttttggaattattcgttcttgtgtaaaatatgttgcaaaatataaaataaacagtacctttacaatgcaaaacacaaagaaggcaaacctcttcagcgtgaatcaataggtaaaaagtttaatttaaaaatgacaaaagagatgaaaaagattgtattgtctgttattgtagcattgattgctattactgcaaatgcgcaggtgtatgtaggtggaacatttggagtaggttctgataaagtggaaacagaaggaacagaagtaaggaatactactttcaagattctgccggaagtcggttatgaactaagtgaagattggtctgtcggtacagtagtcggttatgaatataataaaagcggtgatgtgaaaactaatactttcactattgttccttatgcacgttatttctttttgagtagtaatgtggtccggttatttgccgatggcggatttggcttttctacttcaaaaacgaagggaaatgacgctttgaattcgtggaatattggtattaaaccgggtattgccatcaaattgtctgatcatttttgtctggttgctaagtatggtttccttggatattccaaaaaagagaatcatggatatgagagtgaaaatgttggtatagattttgatacggatgagttaaactttggctttcattatatattctaatcatatataagtgtatctgataatcaggaatcatataactatataatagtttggtgagcggaatttttcattccatgaaagattccgcttattttctttacacattaggactggtttccaaaataaagcttatatttgtgaatgtaacgacggtacaaacgaattgggaactgaaatttattattaactaaaaacaaacagtcatgaaaaaactagccttttttattttattgtcattggttacactaggtgtttctgcacaatcaaatctgaagtggaatgtgaatgcgggtattggtatgtcaaactggtatggtgatgatacggatggtacagatgctaaatttgcttataaagtgggtataggtttggaagtaccttttgctaatactaatgtatggtctttccagacaggtttgaattttatttctaaaggtgtgaaaggtaatggagtaactgatgcttgggacgtggttgatgtgacaatcaaccagctttatctggaactgcctttgatggttggtgctcggatacatacagccagtaattttgaccttcttttcaaaggtggtccgtatttggcttacggagttggcggaaaaactaaaatagatggtgtatccgagaaagctgatactttcggtgatgatggtttaaaaagatttgatgccggtttgggtttaggagttgcttttgaatttggcaaaatagtcgtaggtgttgaaactggcacaagttttactaaagtagctagtggtgctagtgcttataatctttctgcattggccactatcggttataaattctgaccacagatataatcttataaatatataaagaacggctgtttctcttttagaaagaagcagccattttttttagatgaaacgtggtttataaaataaaagctatatttgcagattatgattaaggacacaaactttttggatatggcactaatagatagggtaagggtgataaaactacttctttttgcactgtttgtgatggtaagaacggtggctccggctcagaatcaggtggattggagtataaaggccggtatcggcatggcaaatattataggtgataatatgggatctcctaaagtaaagctggcgtataaattaggcattggtctggaatgcccttttgataaggtctggtctttacaaacaggcgtctcgtttgtttccaaagggactaatcatacggctgttgaaacagatggaatttcggctcaggcgaaggtaaatgtatcttatttggaattgcctgtaatggtggcagcccggtttgcaatggatcggaatactcatatacttgttgctgcagggccctatggagcatgggggattggtggtaaaaccaaggctttagggcatcgctggtcatcatcttctacgccggattggaatactggaaatgtggttgaaatagatacttttggcaaaggcggacttgatctgcgccgtttcgattatggagtggcaatagggttgtcggtggaataccggcattatatgataggagtggaaggacggttagggctgtgcaaacttcaaaaagaacttcaagggaaaaatattaccgggtttgtaacagcgggatataaattttaagacgattttttatatggattgtaaacacggattttgcagactaaacatgacttgctttatatctgtaaatccgtgttgcaatttgcactgagtatgaataattaatgatggaataaacgaataccagtgaatgccatggtgatgccgtatttgtcgcaagtgtcaattacatggtcatcacgtacagaacctccggtttgtgctatgtatgccactccgctcttatgcgcacgttctatattgtcaccaaatgggaagaaagcatccgatcccaatgatacccccttcatggtatccagccatgcgcgcttttcttcgcgggtcagtactttcggtttttttgtgaagaattgttgccagatgccgtctgccaaaacatcttcatggtcgtcactgatatagacatcaattgtattatcacgatctgcacggcggattttttctacccacggcagattcattactttaggatgttggcgcaaataccatatatccgctttattaccggcaagacgtgtacagtggatgcggctttgctggccggcaccgatgccgataacctgtccgtcttttacataacaaacagaattactttgtgtatattttaaggtgatgagggcaataatcaaatcgcgttttgcttcgtctggaaaatgctggcttttagttggaatatgggtcagcaggctttcgtccagtttgatttcgttgcggccctgttcaaaagtaataccgaatacatctttgtgttcaataggtgcagggcggtaagctgggtctattttaattacattgtatgtccccttgcgtttgtttttcaggatttctagcgcttccggtgtataattgggagctatgacaccgtctgaaacttcacggttgatgaggcgtgcggtagcttcgtcgcaagtatcgctcaatgcgataaagtctccgtaagaagacatgcggtcagcgccacgagcgcgggcatatgcggtagccaatgaggtaagtggtaggtcgtttacaaaataaattttcttcaaggtgtcattcaactcgattcctactgcagctcctgccgggctgacatgcttgaaagaggctgctgcgggcagtccggtagcttctttcaattccttgaccagttgccagctgttgaaagcatccagaaaattgatgtatccgggacgtccgttcaatacttcgataggcagttccccttcttgcatgaagatgcgtgacggcttctgattggggttgcagccgtactttaattctaattcctttgccatagttttataatatttcggtttattgattttcaatgtgtgacaaaggtacaaaataaatggggaagacaggttataagaactgtttttggttgcaaacaacatggtcgggtgttattgggggaagctgggatgtgagataggaattgctttgcgatatgagaggttgtttaattttttttttaaaactttcaaaagaatgctgaacaacatttaaacaggaactgagtttcatttttattcggatttttgggtctgtcggactttggtgggaaagtatgtttcaggcttgatacaacatttttctattttccttcctaaagtttttcaagagtggtagcattggcatctgtttttgctaactcagttgtgtgtgctgcgtacatcgtcctgtgttttccgtagctgtcttcccttccctgtcctggcttacggtgtttggttgcccctccggactcgcgctttccccttctttttttcctttttccgtttttgtttacgcgcgtgcgaatattataatgtgtctgtctttttcctcccgtgtcctccgttataaaaaccttctttgtaagacatctgtgattcagcgtattacaaaaaagtttcagggaatccggataatttgtcttgtgaaagtttgcctgttagcgttaaaaggtctacttttgcacccgcaatcgagagagatgcggcacttcagacagtgttactgacttggtgaaacaaacgtgggagatttccttgatagtgatctgcacctggtatcttaccttagcggggctaagggagcgagaacggataagaccccgggaggatggatggtccgccttttatggaagtttcgaaaaaaaactttttcaaaaaaactttcgaaaacatttggtggttacgataaaatctcttacctttgcatccgctttcggaaacgatggcaaacaggaataagagttctttgaaagatttaagataaacaaacaagtagtacaagccggtgcaccgtatatataatatggtgtacggaaaaacaagaaccgtcaatatttttattgtattgatagatttggagtccttgagcgtaaagtcaacttaagtgttgaaaagaatatttttacaatgaagagtttgatcctggctcaggatgaacgctagctacaggcttaacacatgcaagtcgaggggcagcatggtcttagcttgctaaggctgatggcgaccggcgcacgggtgagtaacacgtatccaacctgccgtctactcttggccagccttctgaaaggaagattaatccaggatgggatcatgagttcacatgtccgcatgattaaaggtattttccggtagacgatggggatgcgttccattagatagtaggcggggtaacggcccacctagtcaacgatggataggggttctgagaggaaggtcccccacattggaactgagacacggtccaaactcctacgggaggcagcagtgaggaatattggtcaatgggcgatggcctgaaccagccaagtagcgtgaaggatgactgccctatgggttgtaaacttcttttataaaggaataaagtcgggtatgcatacccgtttgcatgtactttatgaataaggatcggctaactccgtgccagcagccgcggtaatacggaggatccgagcgttatccggatttattgggtttaaagggagcgtagatggatgtttaagtcagttgtgaaagtttgcggctcaaccgtaaaattgcagttgatactggatgtcttgagtgcagttgaggcaggcggaattcgtggtgtagcggtgaaatgcttagatatcacgaagaactccgattgcgaaggcagcctgctaagctgcaactgacattgaggctcgaaagtgtgggtatcaaacaggattagataccctggtagtccacacggtaaacgatgaatactcgctgtttgcgatatacggcaagcggccaagcgaaagcgttaagtattccacctggggagtacgccggcaacggtgaaactcaaaggaattgacgggggcccgcacaagcggaggaacatgtggtttaattcgatgatacgcgaggaaccttacccgggcttaaattgcactcgaatgatccggaaacggttcagctagcaatagcgagtgtgaaggtgctgcatggttgtcgtcagctcgtgccgtgaggtgtcggcttaagtgccataacgagcgcaacccttgttgtcagttactaacaggtgatgctgaggactctgacaagactgccatcgtaagatgtgaggaaggtggggatgacgtcaaatcagcacggcccttacgtccggggctacacacgtgttacaatggggggtacagagggccgctaccacgcgagtggatgccaatccctaaaacccctctcagttcggactggagtctgcaacccgactccacgaagctggattcgctagtaatcgcgcatcagccacggcgcggtgaatacgttcccgggccttgtacacaccgcccgtcaagccatgggagccgggggtacctgaagtgcgtaaccgcgaggatcgccctagggtaaaactggtgactggggctaagtcgtaacaaggtagccgtaccggaaggtgcggctggaacacctcctttctggagaggatccaaagtaaaggtttttgtttttgtactgctgttgttgtttattcaagatatgattccgtattaagacggaagcgagaaagtaagaagccgggtctaatgaaacagactaggttgaacttagtcctatagctcagttggttagagcgctacactgataatgtagaggtcggcagttcaactctgcctgggactacgaatcttgagattcgggggattagctcagctggctagagcatctgccttgcacgcagagggtcaacggttcgaatccgttattctccactccatcagaaacgtaagatacgaagatgaccgatctatgacatattgtacaagcaaacagtaattttagtagtaaagagctgaaagtatatatcatcccgctggcacgcaagtgtgggcgaatgaataaggaaagtaaagaagggcgcatggcggatgccttggctctcggaggcgatgaaggacgtgataagctgcgataagctccggggaggtgcaaataacctttgatccggggatttccgaatgggacaacccggcgtgttgaagacacgccacctgatcatttcaggagctaacgcagggaactgaaacatcttagtacctgcaggaaaagaaaataacaatgattcccccagtagtggcgagcgaacggggaatagcccaaaccgttcatgttacggcatgatcggggttgtaggactacgtcgttgcatgaagacatcggagaagaactttctggaaaggaagaccatagagcatgacagttgcgtattcgtatgttgtcgaagcatagtagtatcctgagtagcgcggagcacgaggaattctgcgtgaatctgccgggaccatccggtaaggctaaatactcccgagagaccgatagcgaaccagtaccgtgagggaaaggtgaaaagcacttcgaacagaagagtgaaatagttcctgaaaccgtgcgcctacaagcggtcggagctgcttaaagcagtgacggcgtgccttttgcataatgaacctacgagttgcctttgccggcaaggttaagtgtgacgacacacgtatccgaagcgaaagcgagtctgaagagggcgtatagtcggcagtggcagacgcgaaaccaagtgatctacccttggccaggttgaaggctgggtaacaccagctggaggaccgcaccaataagcgttgaaaagcttctggatgagctgagggtaggggtgaaaggctaatcaaacttggagatagctcgtactccccgaaatgcatttaggtgcagccttgtgggttactgatgtgaggtagagcgactgataagatgcgagggcttcaccgcctatcaagtcttgacaaactccgaatgcgcatcagttttacctcaggagtgagggcatgggtgctaaggtccgtgcccgagaggagaagaatccggaccacctgctaaggtcccgaaatgacagctaagttaaactaacgaagtctgactgctaagacagctaggatgttggcttggaagcagccattcatttaaagagtgcgtaacagctcactagtcgaggagtctggcgtggataataatcgggtattaagttgtctaccgaagcagtgggatcattgaaatgatcggtaggggagcattccagtcagcgtcgaaggcgtaccgcgaggtattctggagcgtctggaaaagcaaatgtaggtataagtaacgataaagggggcgggaaaccccctcgccgaaagactaaggtttcctgatcaacgctaatcggatcagggtaagtcgggtcctaaggctcagccgaagggcgatgccgatggcagaaacggttaatattccgttactacctccaggagtgatgtggagacgcagtagtgacaatgccgccatctgacggaatagatggttgaagggtgtagatgttgatcttggcaggcaaatccaccatgagaatcgaacctgatagtatgccgcgtccctcgggacaaggcaatagtgcatgtaatcatgctgccaagaaaatccgctaaactaaatcctgtaggtacccgtaccgtaaacggacacacgtagtcgggatgaatattctaaggcgcttgagtgattcacggttaaggaactaggcaaactgaccctgtaacttcgggataaagggtccctacccggtgacgggagggcgcagagaataggtccaggcaactgtttaacaaaaacacagggctgtgctaaatcgaaagatcctgtatacagcctgacacctgcccggtgctggaaggttaagaggagacgtcatcgttgagagaagcgttgaattgaagccccagtaaacggcggccgtaactataacggtcctaaggtagcgaaattccttgtcgggtaagttccgacctgcacgaatggtgtaatgatctggacgctgtctcaaccgtgagctcagtgaaattgtagtatcggtgaagatgccgattacccgcgatgggacgaaaagaccccgtgaacctttactatagcttatcattgaatctgggcacgtgatgtgtaggataggtcggaggctttgaagggggtacgccagtatccttggagccgctgttgaaatacgacccttcatttgtttggattctaacccgtgtatatggggacactgattggtgggtagtttgactggggtggtcgcctccaaaagcgtaacggaggcttctaaaggtgccctcacggcgattggtaaccgccgttagagtgtaatggcataagggcgcttgactgggagactgacaagtcgatcaggtaggaaactagagcatagtgatccggtgtttccgtatggaagggacatcgctcaaaggataaaaggtactccggggataacaggctgatccctcccaagagctcatatcgacggagtggtttggcacctcgatgtcggctcgtcacatcctggggctggagaaggtcccaagggttgggctgttcgcccattaaagtggcacgcgagctgggttcagaacgtcgtgagacagttcggtctctatctatcgtgggcgtatgaaatttgcgtggctctgacactagtacgagaggaccgtgttggacagacctctggtttaccggttgtgccgccaggtgcattgccgggtatctaagtctggatcggataagtgctgaaagcatctaagtacgaagccggccacaagattagatttctcagggtcgttgtagactacgacgttgataggatgcaggtgtaaagatggagacatcaaagccgagcattactaattgcccgtccactttccttatattttggatggtgtatacgttcggttattactacaggataagataacgctgatggcttgtcgatatgtcgctcttattcaggtggctatagcacaagggttccacctcttcccattccgaacagagaagttaagccttgtcacgccgatggtactgcgtcacagtgggagagtaggtagctgccgtttttgattgaagcctccggacttgaagaagttccggaggctttttttttgcatccacgtgtggctccggacactcatgccttggaaaaaggcgggaaatagaacaggcaggtctgaaggcccgcctaacagagaaacggaagatgattatagcgcctttatgcaagctatcagtttgtctacatcttcttcttctgtatcgaaagaggtaacaagtctcatttctcctatggcttcgttccaaaagtagaaatgataatatttttgtagcttattttctttttcacgtggcatgatgaagaataattggttgctttccaccgtttgggtaaactttatatcaggcattgtggaaagttccttgtacaagcgttgcgccattgcgttggcatgttgtgcgcatgttagccataggttatcttcaaggaaggctgtgaactggcaagagatataacgcattttgctggccaattggcaggcttgttttctggcataacgcgcttcctttatcaaatcttgattgaaaatcatgacacattcggctcccatcagtccgttctttgttcctcccaaagtcaatgtgtcgactccgcaagctcctgatatatcatcaagactcattcccaatgctgccgcggcattagagatacgggcgccgtccatatgcacaaacagtccatgtcggtgtgcaaattctgtcaatgcgcatatttcttctggtttgtaaattgttcccaactcactacattggcttaggtaaattgctccgggctgagaatggtgttctataccaaagttaaccataaatggttttagtaattccggagtcagtttgccatccagagtaggaattgtgcgcatgaaacagccagtcgctttactgggggcaccacattcatctacagcaatgtgagctgtgtcggcacagaagataatatggtaaggacgggtcatcatttgcaacgccatagtattactgcctgtgccattaaaaacaaacagtgcttcacatggacgtgaaaattgttctttcactttgtgggcggcttcttctgtccacgggtcatctccatagccaagtgcatgtccgttattggccttcattaatgcttccatgatacggggatgtacacttgaattattgtcagatgcaaaacttctcatattctttctctattttacaatttatttgtaaaggtaggagctttttcaacaaaatgcaatgaaatgtcattgaaataaatatgcaaaaggagcatcatgcagatgtattatacatgtaatgcttttatctgatctttgccatcggaaaaatagcaaggtaaaagtatgatgaaaattcagatgaaaggcattagccttatgataattcttttgatgctggcattgaccgtacaggcggccgttttgcgaggaactataacagataaagcgactaaagagccacttattggtgctgccgtacagttaagtggtacaaatataggaactattactgatgtggatggtaattttgaacttgcgggattaagaaatggaacgtacaagcttattatatcttatgtgtcttattgtacacagattgttgaggttacaataaatggtatgttcgaaataaaagtagaactagaacaggataatcaacaattaggagaagttgtggttgtagcggatgctaaaaagaatacggagaatgctataattacccaacaacgtaccagcttggttatgcaaacgggagtttctgcccagcagattaccaagacgcaagataaagatgcttcggaagtgattcgccgtgtgtcgggtatcagtataattgaggagaaattcgttatggtacgtgggctttcacaacggtataataatgtgtggattaataatagtgccgtgcctagttcagaagccgatgcgcgtgctttctctttcgatattattccatcgtcgcagttggataatatgttggtagtgaaatcacctgcaccggaatatccagctgatttcagtggtggttttattttagtgaataccaaagatgttcctagcagtaatctgtttactatttcggttggaactagtttaaatgatcagactcattttaaaaagtttctgtataataaaggaagtggcacagattttctaggtttcgataatggctttcgtagcttgaaaggtggaatcaatgctgtgcttaatccgataaataacggctatgatttattaaataatgggttgaacaatgactggaccgttaaagatcgtaggcccttggcagatcttagcatgaatatgaatttcagccgtcgctgggtggatagtagcggacgtactttggctatgttaggaacagtgaactatagtaatagctataagacatatctggatatggataacaatttgtttggtgcttatgatacgacccacgactgttctaattatttacgtaaaagtatagatgaccaatataatcataatgttcgtataggagctatgctgaattttacttatgtacctgccagtggtaacagccgctatgagtttaagaatatttttaatcaattagggaaagaccgctatacttatcgtaaggggacagatgcacaaagtgattatgaagagagcgcggaatattattatcagagtcgtaccacttataatggtcaatttacggggaaacatacattgggtgatgccgataagttggattggagtactggatattcttatgccaatcggaatatgccagaccgccgtcgatatactaccgtactcaatgaagagaccaatcagttggaagtagagaacttgaatgagattaatcgggagttttcccgattggatgaacatattttgtcggctaacatcaattatcagcacgatttttctttcgggatttttactcctagcctgaaggctggagcttacacggagtatcgtgctcgtgaatataatactcgtttttttatttatagttggaaaaatggtttgccgagtgcttataaagtaatgaatgtccctaatgaattattacaagagaagaattatggggagaatggactttatttattggaacaagtggattggcgcaataattacgaaggcaataatctcttgagtgccggttatgtagggaccaatcttccattgggcaaattgaatgtatacgcaggagttcgttttgaacataatagaatggagctggttagccatacacagaaaaacgaggaaagccccactagcgtgttttacacgtataatgactttttcccgtctgtaaatgtggcttatcgtctgaatgataagcagcagttccgtttatcttatggacgtactgtgaatcgtccggaatttcgggaggtttcttcttctgtatattatgattttgatcttgccagtaatgtacaaggtaattataatttaaagcctgcttatattgataatttagattttggttatgaactttatcccagcagtggagagctgatttctgtttctcttttctataaaaggtttaaaaatcctattgaatggacttatactgtatccggaggcacagaccttatctattcgtatgtcaatgccaaaggagcggataattatggggtagaggtggatatccgcaaaaatctggattttataggtatgcgtaattttagtcttagtctgaacggggccttaattaaaagtaaagtgaaatttgagccgggagccaaagaggaggaccgtccgatgcaaggtcaatctccatatttgattaatgccggttttttctatcaacatgccgatagcggatggaatgctgcattgctttataaccgtatcggtaagcgtattattggtgtaggccgtagtttgggaactgcaggcaatgaagtaagagtacccgattcttatgaaatgccccgtaatgcagtagatttaagtgtctcgaaaaaaatcggtaatctggaaataaaggttgctgtacgcgatttgttggcggagaaagtttcttttaagcaatttgaagaaactaggcatggaaaagtggagcaaattacccgtcaatacaaatcagggcgtaatttcaatttgaacattaactatacgttttaaaatagaatgaatctttcattattaaccaataaacaaatggaaatgagaactaacaagtttatgatttacgtattctcagcaataatgctggggggaatggttgcttgtagcagtgatgatccggaaactgatacaggaaacggtaatggcaacggtggaaatgctgaagctccttatgtatgggggactgagggagctattaaaacatgtgaccacttgttatttaatgatgataaaactgagaatgccaaaggtaccgtgataggaaatggagatcaggaatttatttttaaaggtacacagactttgtctaaaggaacttacctgatgaaaggatggatttatgtggggactgggtcggtattgaccatcgaaccgggaactgttatcaaaggggataaagatacacaggctgccttgattgtagaaccgggtggcaaactaatagccgagggtactaaagatgctccgattgtctttacctctgaacagcctaaaggccagcgtaaaccgggagattgggggggattgattatttgtggtaatgccaagaacaatcagggagtgttgaatcagcagattgaaggaggtccgcgtactaaacatggaggaaatgatgatgctgacaattcaggtatattaagatatgtacgtgtggaatttgctggttatccttttcaaaaagataaggaaattaatggtataacttttggatctgtaggtagtgggactaccattgatcatttacaggtatcatattccaatgacgactcttacgaatggtttggaggtaatgtaaattgtaaatatctagtggcttataatggatgggacgatgaatttgatacagataatggcttctccggtaaagtccagtattgtctttcaatccgtgacccgagaatcgcagatacttctcagtctaatggttttgagtcggataattgtggagacgcctcattgatagaaccctatacgacagccgtatttagtaatgtcacttttatcggaccgttggggcgtgatgccaactttgttaataatgagagctatattaccggtggtagcttcaatcctaataacggttcagctttaggtaagttccagtctgctatgcagatccgacgttccagtcgtttgaattgctttaattcagtagctgtgggatatcctgtcggtttaattattgatggtgagaaaggtaatacagttgagatgaccaaggcaggaaacataaagttggagaatatttggtttgcaggtatgacggcggtcggttctgatgccaacaaaatatatgatgatgtgctttatgatgccgtgaacaagcaaatcattgatgctggacaagagtcttactcttctactttttttaaggctcagaaaggaaataaagtattgactgatgtcaatgagttgaaattcaaggacgggcgtaatatcggtgttaattatatgccggatgcaggtagtcctgtgttgacagccgcttcatttaatgacgcactgttgagcagtggttttgagaaagtagaatatatcggagcgtttggaacagatgataattggttggatagctggactaacttcgatcctaataatacagactactaatacacctttgaatatacacacacatagctgttaattttaggggattctatgcggtaaagtcatagaattcccttatttttgtatccaaacctagaaactattaattaatacacctatgtatccatttaaatttaaccccattctgaaatccaccatttggggtggagaaaagattatcccgttcaagcatctgaatattgaacagcctcaggttggtgaaagttgggaaatctctaatgttccgggcgatgagtctgttgttgctaatggaactgaagccggcaaaaatttgagccagttggtaaaagaatataaaggatctctggtaggagaaagtaattatcagcgttttggagataattttcctttgttgatcaaattcattgatgcttgtgacgacctctctatacaagtgcatccggatgatgaactggcaaagaagcgtcataattcgatgggcaagactgaaatgtggtatgttattgacaatgccggggggaaagcacatctgcgttcgggactaagtaaaaagattactcccgatgaatatgctgcaatgattgctgataatacgatttgtgatgcattggctgattatgccgtacaatcgggtgatgtgtttttcttgcctgcaggacgtatccatagtattggagccggatgctttattgctgagattcagcagacctcgaatgtgacttaccgaatttatgatttcaatcgtaaggataagaatggtaatactcgtgaactgcatacagaattgtcaaaagatgccatagattattctgtagaagaggattatcgtactcattatactccgaaacagaatgagtctgtcgagttggttacctgtccgtatttcactacttctgtttatgatttgactgaaaatatgacgatagattatagtgaactggattcatttgtaatttatatttgtatggaaggtatatgtacggtaactgatggggatggtaactcattggaattgcaagctggtgaatctatccttttccctgccacaacaaaagaagtgaaagtaaccgtggaaggtcatgttaagttcttggaaacttatgtataaagattcgttttgtctttaataaaataactgctgtctccaatacatacaatgaaggcagcagtttattttattaaagactatgtttcctgtttaaaaggtaaacttcaggcatacaggtttattggtttttattgtcttgcctgtgtctttcagtaatcctgtttgggaatctctttcaaatacttgtatagagttactgtctctgcaggccaccaacaggtatcgcccgttccggctgataataaaattacgtggatggataccagtcagctgataacctgtctttgttaatgtcccttcttcctgatttatggaaaagatagcgataccgtctgcttttaagcggttggatgcatacagaaattttccatcgggtgaaatgtggatatctccgctacctttggcacccactgtgtcagcttctatatattgtatggcgtttaattttcctttgtcgtaagagaaagctataacttttcctgagatttcgttaatcagataagcgaatttttggttcggatggaaacaaatgtggcgtggccctgatcctgattctacttttatattaaattcttcagattcgttcagtaaggaatgggatacgccatcagttacattctcactaacaggaaatacatgaatctggtctgtccctaaatcactggcaagtagatatttatggtctggagtgaattttatacaatgtagatgtggttgtgtttgcctctctttgtcaagactgtttccggtaaaggaaataaggcgtgtctcggattttaattttccgtctttatctagtgggaaaacggtaatgctacctcccatataatttgctgtcaagacaaatttttccgatgggctgagagttatataacaaggtgcgccgccgtcagtgggttgagaattaagcaaggttagtttcttttgttctttatcaaatttgatggcattggcggtagaactttttccggcatcctcccctacagtatatattctttttccatcagccgacggaatgaggaaagaagggttggatattccttttattccgctgatatattgggagttgccagtttgctcatcaaagttataaaccttgataccttcttcatctggagttgcataactacctaccaacatatacatcatattcggatttttttcaactgtaattggttctgtttgtttcttgggagagggtatacagcctcccagtatcatactgttcatacacaataccattaattttttgttcatattgtctgatctgttagtattagaaaaattattttcaaagatacgttgttcttattaaaatgcgctaaataaacgaataaataattggatattaacagaagtgtgtgtatatttgtaacctctttatgagttaccagtacggggttgactggatttgacagcgtggctaagtggtatgtaagcatgcagtgcgtggttgattggcactataatcccagttttcaaaattttatctggcaacgaaaattatgctcttgctgcttaatcgaatcatagtagattagctttatttctgccaaagtggtggaaacgagacatcactcaaaagctcttgttccgaagcgtttgatcaagtggtgcagtaaaatcgggaatagttagagatccgcttcatgtctcttacgaaaatttagaggataaggtataagttggtggcttcggtcctgcttatactcgaaaatttaggcgaagataagcatgtagaaagcgtatggcttcctcgtttggacgagggttcgactccctccagctccataaacaatattgataatcaggtgtttatattgtttacaccccaaaatgcaccctgaaataaaaatgatagtctgattatcattctttatatcaaaagctatctgcctttcttaaataaattaactattgtgatgatttgtgatattctattttaatttttatcattttgtttgttcttatcaaggcgatttcctatctttgaaacatcattagggcttgactggaattgacagcgagttggaatggtatgtaagcatgcagtgggtcggtaatttccacttaaatatcagttatcaaaattttatctggcaacgaaaattatgctctcgctgcttaatcgaagtatagtagattagctttatttccgccaaagtggtagaaacgagatgtcactcaaaagctcttgttccgaagcgtttgataaagtggcacagtaaaatcgggaatagtttgagtttttcctcgtaactcttacgaaattttagaggataaggcataagttggtggctttggtcttgcttatgttcgaaaattttaggcaaagataagcatgtagaaagcatatggtttcctcgtttggacgggagttcgattctccccaggtccacaatacttagataattattttttatgtataaaagtattcccgtacagaatttgatgttctgtacgggaatatttttaagtgttcgatttatatgaatgtttcttaactatttctctgttatcgctttagacattaaaaagaatgaatcctctccttcataataaacaatatcataacaagcatcttcagatcgataaagggtttcatcttccctttttaatcccaaagtttctgtaagatattgtggtatagcatcaaacaatttctttggattatcacctatcggagaagcactcgcatcaatctttactttaatcacaattacacactcacattcatgaagaatgccaacggaatacgttgcaaaaacctgatttatgccccaatctctattatgcaagtcaatcattccacttgttggcatttgttttatattgtataaatccataatttttggaatggtttgaccaatttttaagctgtcaatgccgtcggatgttaatttatcgaatattgatgccaatgttttcttttcatctatataattggttgcaactccccaagcatcataatcagacaaggagtgaggtgctattaaagaagaccaaaaggatgagtaactgggggcatttgtaaatgggggaactgaaattttgtaataagagttgttgtctattggattcccttttttgtcagcaaagtaatatttctcattttctgccattatgatatattgggataatgggtaaaaacatgaaacgttttctattttatttttaatttcacctttagaatttattgcatatacattcatatattgattatcccagtcatcttttaaattagcaattgtatcagcaacatatatccaatcacctacaatacctaaagctcgcgaatatttaggctctccgatactttctccttgtatgttaagctgtccccataatccagttttactgtcttgaaataaagcaacattgtcaatgaaaggtgaaatactataaatattagaggggaatctctgtgctttttcgcctttttcattgagtaagaagttttctattaaacaatatccgttttcaaaaaaggtgtatgaatattgttggtatccattggaactggcttcaaataattcttttccattggggtcgataactaaccatttgtcagcttctttgttatatacaatagcttttccttcatggaaagggaaagcgttatcataaataggttctatcacaacattgccttgtggatctatatatccgcatttacgattttctaaccgaaaccaagcacgttgctccgtaaagaatggagatacacataagaattcctttccctgatacggaagcaaataaaatgcagtttctcccgtttctgttagatagtgaatacgttcatccgcagaaacaacaggaattattccttcgctacatatgcctccttgcttataacctttgggagttcctattaattggggagttggagttgcggaatagtaaagatattgatttgtatcataatcccgaattctaaacactccatttactgcataagacggtcttttgtcaaatttattttcaaacaagatgtttccatcaactccaaccataccccatttcccatgtttttctttttggaaagctacatgggtcacttttgggaaatcggtatttgacttaaaagaacaactcgaaagcatacccataaatattacaagcgataaaagcaaaggacgaaaataccaattgattgttttaggtttcctttcagtatgaacatagggaattttgtccaatgaattttcagtatccaaatctcgcagaacttttcgaatgggtaacccctctctattatctttattgaaaatgccattctttataaaaagaggcataaactcttttgcaaggatcattccgctttgaggatgtttcgcaaaataatctcgcaacacactgttgattcttaaaatacgttcatttgtcttcataatacgtaatattataaattattcggaatatgtctttccattaatcgttatacttgttacattgcttgtatctttaccagccatagctgcaccttcctttaccgtctgaatcagaataggacccatctgttccaaagctctgttaaaattttcttctatttgttttctcttttgagaagggctgaggtaatcgctacaatccaacactttaccacttttatcgagggtaaaaactttttctaagaatgaactattcccattcttttcatctattgtatatgcaacagcgaaggctacaaatgcgctatcaccatttcctataaatgcgagttcatcgaaaatacctcgtgtatctaatagcttgacgcatcctgatattgaatcttttttatatgtattatccatttgccatacctcaacgggaatacttgtctttttttctgccaaaatccattccattattttgtaactttctccttcttttaaactatcctcaatggaatggactacgtattgtttaccccattctatgatttgttcatcggaagcgtttgcaaacagtacatccttctgtggtggtgaacaaccaagataaaacatcaaaatgaaaatagaagtaataatttttttcataatgccatattatttaagttagaattaaattttttgattaatccataaaaggagaagcgattagacctattaaaattactatacaaagtagaatgataatgatgattgggatcatcaggcaaccgccacatccttgtagaaactccgctttaccttttgcaaactctatttgggctttctcatattcagaaagtctttcagtattttgctccttcataacttcattgtttgttcattgtttatatcaataaccattaatgacttcattcatgtcatctacaacttttataacattcccgtcagaatccaatacaaaaagtttctcttccaccacgtaaccgccataactgtttttagccctatatttatgaagagcaaaataagtattattgtctttattatatataccaaaggcttcccaacttattccttcataactatcagggtctttaagataatgccgtttaagatagacccttactcctgccatagcttttgtttgagatggtcctttgttgctcccgtagttttcgattctattgttaccctttgaagaagtgctgtattctctacttgaaatattgaaaattataaccacaacaagaaaaatcaataccgctatccattgtcggcgttctttattttttttattttgtatgtagatgggattttgaataatacaaccacaagaaaggcatttaatgtacttcttattttttaacccttcatcaattgttagatttataccacaattgctgcattgcaattgttgtggataggtatttagttttaattggttatttggtattggggcttgtttcgccgaagtgcatgaacgaagcgcagaaagctccttgcggaaatcaagattagttttattgaaatttccttgcaagttaagcgggggattatatatgcgaatcaattctttttcaacatttgcataatcattatttgcataataaaaaagtagcaggttgtctttcatccattcggtcagtgtacgctcgtcaaattcaccaaatgtagtttttccgttttggggagagtttatgtctcttggaatcagtttgaatcccaataaacatcctaatgatttgcgaattgtggaatttccggcagtgccagtgaaatgttgtttgtagtcacgaatacgcagacttttactgcttttgcctacatacacgacattgtatttctcttttttgtaatcaaaagaggttagtataggagtggtggaaatttgtacttttatgggcaatgaggacgtactacgtaatactatgatatagttaccgggcttgtcaggtaagactgaagctctcattttttgagggtcaaataaagaaaattcatcttgtgaaatcatgttgttggtttcatatatagccgcctgagaccccactaagcagagttatacaaaaagaagcgtgggtctgcatgccacgtcttagatgaaggtcgtaggaaaataccttgagtacagatatggatatagcagcccacgctatagcgtgagaaccactatgctatccttgtactctttgaaaatttcctacgttttcatctacaagataagcataacgcttctaaaaattctaatatgtcttggaaagagcatactcaatccaatacaaaaatacaaaaaacagctaaataaatgaaaccaaagcccctattttttattacgttttacaatctcaaccctcttttcggtttgttctcttcttttggggtgtggcttacacccagcttttctttgagttcctgaaacttcattttgaaccattcgagtatgggcatgccgtcaatgcacagccggaatttccctttctcctgcgggttcctctccacggttgccgtcgagtgctccgttctgaacttctccttgtgttccttcgaatagagccttcccttgaactccacgggttgcaggctgacaacccgccttgtcagttcctcggtaaaccccacttcccggcattgttcggttatgggcaacagttccttcacgatagggaaataggtgtctatctgttccagtctgttgtcgtattccctgattttttgctggtagctccggtctatcttgtttatctcgctgttgtggcggttctccatttttgtctgctccctctgttcggcttgtacctgcttttgcagagccacaatgtcctgcctcaaattttcgttctccgcttccagcctcttgaccttgctgccgcccaaaagagaactcaccccgtccgctatggctgtggttgcgttcaccgccgcacccttcatcttctgcacgttgatttcccccttgacctttttcagcttcttctgcgcttcctcttccagccccagcaggttttcgatgttctcctgcaggctgtcctgccgttccaccagttccttgtaatattgcgaggtcggtatgtgctttgccagcgaaccgtccacgcctctctgcaagccgtacttgctcatggcttgtgcgtaggtgtcctgatagtgtttcagcttgtgccttgccatgacgtcatcggcgcacagccgcacatcctgcgtgttcttctttctgtacttcttcttcccgttctgttcgtcttgtctggctttcctgcgctccccggtcactatcggtacaatggtggcgtgtatgtgcggcgtcttctcgtccatgtgcaggactgccgacacgaggttccgctcgccgtatgtttcccggagccatttcaggttgtcgctgcaccagccgtcaagcctcccgtcctcttccatacgcttcatgtcctcgttgcttccggtgagcagcacccggattgcccttacctggttggtacctatcttgcgtttgatgcctgccgtctctatccggtgcgctatcgcctgcgtacggttccttaccccttcggggaactgtaccagttcccggttcaggtgcgttcgcgttctgtccgcattcttcgggtgtacggtgcgctctatgtgcgtggacattgcgccgtccgcaccttttgccttttccaaatgcaaaactgcatatcccataactgtaatacatttttcggttaatacttcccctgccttgcttccatgccgcatggctcacggggtttcaaaaggggcggcgtcccttttgctcattggggcttttttagcgatgcgtgcattgcgtgaagaaaaagccctaatgagctatggcttttttaaagccttccgttggcatgtgcggttacatcccgatgcctttgcctttcctctccggttgccttgcctgccgttgccttttctccggttccggcttctcctgccaccgttccgcttgtcctgaccgtttaccacaaaggaagtcgttcaggtcgttgtagcctccgtatatgtgcgatgcgtcccgtatgcgcatcccgtattcctcccgcagttcctgaacggcttccattcccgccttgtcgttgtcaaggaaacaatggatgtgttcgtaatcgcccagtgggtggattgctttggagaggctggcagtcgagttcagcacaatgtagtcctgcccgtcaagttcggggcgtccgggacacctttccagccgcagggtgaggaaggagaggtagtccatgaagccctcgaagaggtagcaggtctccttcgtctgttcctgccgtatgtgggtgatgtccttcggtgctatgcagcccttgaagaacttgttgcgtatctcgtagcctcccgaacggttgggaaaaccgacggcaaagtaaggcttgccgtcagtttgatagcgcacctcgcaacattctctttttgccagttccgtatttatccccctctgccgcagataggagaatagggcgggggaagaaagcggcaccgcctccaactgtcggaagctcggtttggagaaaggttgcccgccaaaagagaaggagaccgggcgcacgtttggtgcctgctccgctatcttttccaagaggtagggcaggctgtcggatgcgtagagctcctgcgccagtgcgatgatgttgccgcccttgctcgcgccaaaatcgtaccataggttgcgctcggtgttcaccttgaaggacggttcgcactcgtccctgaaaggtgacttgtaccataggctattgccctgccgtcttaccgggctgtagccaagactgtgcagatattcctctatgcgtatccgcttcgcttcattcgtattcatgtgggtttctgtttaagtggatattgttttttgttttcgcccgtaccttctgcatgctgcgggctgcatccgctttactttatttcgctatatatatgcaccctgactaaagtaaagcggttccgggctgtcatgcccgtgctgtttttcttgtcaggcggtgtgaacatctttttttgttttcgcccgtacctctctatatgttacgggctatatccactttactttatttccgtatatatatggtacgtgactaaagtaaagtggttcccatgccataccgctaatagtggaaatcgggcttgaaggtgtatttcctgccgttctcctgcactatcatccgtttgttcttcaatagggtaatgaggtctgtcaccctgtttccgccaagtatgacgcccacagaggcgtaggcatccctcaatactcccgcaagttccttgtagccgtattcgtctttcagggtgaatgcggcttccagtgcgatgcggtgctgctgctcgctgatgtccttgttggggtcgaattttcccctcctccctttgcccggctccttctccttgaaccggtagccgtccagtagttcgggcagtgcctccccattgatacggaatgcgaacggctcgaagtccaccgccctgatgtgtgcggctttgaccttgcttatgtcggggttattctcgtccttctccacttgcagcaccgtttccgccttgttgcttagctcggttcctatgtgaccccttgcattctcgtcccccttgttctggtgcaggacagtatggatgtggatgtccctttcccccgtccatgtcatcagataggagattaccgttgtggactcaccggggttgttgatgtcatgcaccatgtcccgtattccgtcaatgactaccagcccgatattctcggtgcggtagattgcctccctcacgattgctatgcgctcttcgggcgtgtacttccttaggacgaggaattcaaggtcttcatggtttctgtctgcgggcagtcccgccatgcgcaatatccgttttgccacctttgcgcagtggtaggtgctttgctcggtgtccacatagagtattttccgcttgttttcgggcagttcagccgtgtagcttagtaccgtcccgtttttcagcgcagccgccacgattgcggagacgttgaacgtcttcttgctcttggcttttccgattgacgcgctgaaattccccagcgtaccgatgacggagcctcgcactttcagaatttcgggtgccttctcgtagtcttccgaaaggtcgagccgtgaggcttgccataggattaccgcctcttcgggcgtgatgtttctttccttgttgtccatatcgcacctccctatctgcgtcccccgcttttgtgtcctgccagttcaagcgccatgtccgcatcgacgatgatttttcgtcctatctgcgtaatggctctgtctatcctcccgcttttcttgatgcggtttgctgtgggtatgctgcacccgaacagccgggctatgccgcctatcccgtacacgtatttcttgtccttgtcggctgctggctgggctggcttcgtttcgcttccttgcaaggcatggcggttcaggaatatgaactcttcgcccgtcatctgccatacgggctttgataaaaggtctctaatttccatatcagaatgaattaacgtttgtactgcaagccctgcgcatgggctttttacctcgttcgaacagtgcaaagttagttccgggtacgggtggtaaggatgtggatagcgtgattgtggtttcacgctatctcactaaatatcagaagataataaagggtggcggaaattattttgagtggtaaaagtggtcgtgtcgtggagtgtcgggacatatcaccgactatcggaatattgaccgcatttcctttgcaaatacctgattgctgtcactggggaaatcggaaacgggctctttgtattttgacttgtagtatgcatcgtctattcccagcaggttcatgatgtcccctttccatttttctctgtccggcttgggcagcgtttcacccataaggaaaatgagatagcatacacgggctttctccctcggtcttattttcagtctgccttcgcatggttgcaggttcatgctggcgtagaagtccagttctgaaacggcttcgaactgctcaccgttgcatctttcgtaaacggctgacaaaagtttcatggggaagtaggcgggttggcttgtcggtgtggtggcggcttccttttcctctccctcctttttcttttggtcggtcaggtatttttcaaggattgccaatagtgagccgcccagtctgcaaatgtccccgcaacggtttttcaggcattgcagggcttcccgccttgcctgctccttctgtttgtacagttcatccagtttggctttttccttgtcgtattcccgcttgcaccgttcgtaccttctttccagcagttcctcttcctgacggtcatgctccctgaagcctaccgcttccaaagagccgttggcttccatgagttcccggtaatatccgtttgtgactttcatctgtctgtcgatgtcccagtcaaaacggctttcatgccgtcggcagacgtattcggtatcgagacggtcgaaaaactccctgcaggcgttgtaagtcgagatgttgctttcaatctcacgtttcaggctgttcagcaatatggagaagtgtgcggcgtccatttcaagcatgaggctgatgagtgcggtttcaaatgtctgcgtgtccccgtactctccgtaaaagccggaaatgaattgctgcttctcaaaagagaaactgccgccggacattatttcggtatatatcttgttgagtttcccgtagtggggtatcattgatgttattctttcgtccatagttatatcagattaaatttagtcatagcgttgattttgatttcatccgctatatcaatatagggcttcatcgctttgtaatcgctgtgtcccgtccatttcattactacttgtactggaatgccaagtgccaaagcattacagataaatgttcgtcttccggtgtgagtacttaataatgcgtatttaggtgtaacttcgtctattcgttcatttcctctataatatgtttctcgtattggttcatctatttctgccagttgtcccagttcttttaaaaattcgttcatcctttgattgcttacaactggcaatgccctgtcattagggaacggcacacctttgtacttttcgagtattgccttgctgtggtcatttaattcaataataagactgtctgccgtctttatggtaataacttcgatatgaccgtttttaacatcactacgtttcaaattatacacatcggagtgacgtaatccggtgaaacagcaaaatagcaatacatcccttactctttcaaggtatttctttgttggtggtattgggcaggttcttagtttatttatttcattttgggtgagaaatatcacttttttgggtgcactcttcattttaggcgtgaatttatcataagccatgttttggtgatacccttttcgattactccaacgtaagaaccattttacgaatttgatttgtttggcaatggaagtgttgcgcatgtttttttctgtacgcaagaattctatatagtcattgaaatgtttttccgtccaactgtcaaacgtagtattagggtcaaatgtataaatgtgttttttgactgttgcaaactttttgagggttgaggaagaccagtcattttgtttgctacattctgctacaaattcattgaaaactttcatgaagtctaattcaaccttttgcttttcctcatggttttctttcttttccccttttgtctttaggttgaacgcttccttaatttgtgcaggggtgggtattacatcttgcacctcgaattctttgaacacattctgtatttcggtgtattgccgtaatagttcggcgttgatttcggatgcactttgctttagcttgttggtacaaccgtttctaacccgttgcttgtctgtgtcccatttttctacatcgattctatatcccgtagtaaattcgatacgctgactggcaaagataacacgcatacggattggcacattctttgtgactggaataccgtcttttttgcggctttccggtgcgaaaatgatatttcttttaatattcataattgggtgtgtttgaaaatgacacccaaaaatacacccgaaaaatgagatatacaatgatattaagagatatttagattaatgaaagaaagagataaataactgattacatgatatttgatatcctgtgaaattttataaaaaggttcgagagacaccctccagctccacaaactaagagtgattcgtccttgggcttcaataatccaaggacgaattcttttttagaagagtaatgtatgcggttactcatgtttcttttctgatgtgtgtagaatacatttctctcttttgcatcggaaattcttgttttttacgtaaagatgcttgtttaaagatgaatgttattttattgtttaatgactaattctattacataatctatgtcatcaggtacttgaggcagttttattaatatgccgtttttttcctgtttgaaagaaagtggagttctggaaatgaactgtattgctttctttacttttgcctttagaggtatataaagtgcattatcctgcaaatctagtatatggatgaataaacgatcacctttgcgggttgatactccccatgtgtgaggagctacatcaccaccacgggttccataaatcgtctctccatattgattcatccatttacccacttgtttcagatgctctatagctgtagcgggtaattctccgttgggttgaggtccaatattcattagcaaatttgcattttttccggctgccttaaccaaatagtgtatcaactctttgggggatttgtaattttggtcttcaattctgtagccccacattccgttcattgtttcacaagtttctaaagggagttcacttattccttgtcctgctgaaaaaccggctttgttttcaccgggcaaatcacgttcgaacatttggaaatcttctcctgcataaggagttcgatgatgattgttgcctattagacaggatggttgcagtttatgaattaatgcatattgttcttccagttgccaattgaagttggtaggttgatcccaaataccgtcaaaccaaatggcgccgacggggccatagttagtcaaaagctcggtcagctgtttattcataaacttgtagtaactttcccagtttccatgtcctttgggacgtcctgtcccatgtccggtgtttccttccggatagtcgtcacgaaaccagtccaaatgcgaataataaaaatggagtttgatgccctgtttttgacattcttctgccagttcttttagtacgtctcgtttgaaaggagtagcgtctacgatattaaaatcggattcttttgtatcaaacattgagaaactgtcatggtgtcgactggtgatacagatatatttggctccggaggttttgatggcagaaacccattcggcagcattgaagcgcgaaggatagaatccggatgccagtttggcgtattcatcacggttgatgttgtgagtgttcatataccattctccttgagcggtcatactgtaaatgccccaatgaagaaatatgccgaatttattatcttgaaattcctgccgtgcttttatattttcaggagtagggatataaatttgattggagatttgtgcgagggctgaagttcccgccatcaataacaaggctgcgcctaatttgattttttgtgctaatttgtttctcattgttattataaatttgttttgcgaaatatagttatactcttggaatatttaaagcattttttgaaaaatattgcactgcgaattaaattttaatagattctaactgggtggtatgtgaagagtattttttgtttataaggtataaaaagatgttttctattgtttggaaattaatcattctatacctttgtgaaagtaatattgaattttatatgagagtaaaagaaattcctatactgcttttgaccggttatctaggcagtggaaaaacgacattagtgaaccatattctttctaataaacgtggtattaagtttgcggttattgtcaatgatatcggtgaggtgaatattgatgctgatctcatacagaaaggagggattgtaggaaagaaagacgaaagcttggtagcacttcagaacggttgtatctgttgtactctgaagatggatttggtggagcagatagatgatattatgaagttggagcgttttgattacattgtgattgaggcaagtggtgtttgtgaaccagctcctatcgcacagactatttgttctatttcaagtatggagaatacgtacgggggatgtcgtttggattgtattgtgactgtggtagatgccttacgtctgcaaagtgagttttcttgtggcaacgatttgacccgtaaaggtattgacgaagaggatattgaaaatctgattatccaacagattgaattttgtaatgttgtattattgaataaggtctcagaagtgaaacatgacgaattggaacgtatcaaacagattatccgtacattgcaacctgcagctgaaataatagaatgtgattatgctgatgtggatttgaataagataatctatactgaagtatttgactttgaacgtactgccacttctgccggttggatacgtggaatagagagcgcccttacggaagagcagaaaaaagaagcggaggaacacgcgcaccatcatcatcatgagggtagtgaagtggatgaatatgatatcagtacttttgtgtattatcgtcgtccggcttttgatatccataaattcgatcgttttgtatcaaccagatggagtcgtaatatcattcgtgcaaaaggagtctgttatttcagcaataatcgtgatatgtcttttctttttgagcaggctggtgtgcagaaaaagttgaaggaagctggtttatggtatgctacggcacctgaagaagaactgatggaggtaatgcgtcaggagcccggcttgttgcgggattgggatgataaatatggagaccgtatgcagaaaatagtttttatcgggcggcatcttgataaagaagagttgataggtgaacttgatgagtgtttggaataagatatgcatatagatagaataaaagttctgtttgcagaacttttattctattatacagattttgtgaagaatcagtaaacatctagtattacacgttctttttgttttttcggatattccggtaagttttgtccatttacaaaagtagctttgaggcagatgttttctacacaccttaagtaataaggatgaggggccttttgtacatggaaatgctctatctcaatatttttgataggcttttcttcatatccatctataaaaattgcataatggtcggaacagccagcctttacattgttgatgcggaaattctcgtattgagaggtatgtctgccacctcggaaaccaaaataattggtttcaaaacggagcactgctccttttgagcgttctatagtaatattgctgacttgtatattacgaatatatcctcctctgtcacggttggatttgaaataaagggcattcttgaccgttcctatttgtatattatccatatatatgttttctacaccgcctgacatttcactgccgatacataatccattgcattcagactggaacagacaattacgaatgacgatgttttttgaagggcgtcctatttcacggccgtcggcgtcacggcctgctttgatagctatggcatcatctcctgtgcggaaaatacattcttctattaatacattggaagttgattcaggatcacatccatcattattaggatagtgactgtcaatggtgatgcttcgtactattacattgtcacagtatacaggatgaatagtccagaaaggagaattcttaatggtgataccttctactaaaatgcgagaacatcccatgaattgtatgcaagagggacgtagtatagtacctttcccaaagatcctttctgtgacagggattagtttttctcccattttacgcagacgatttctgtctgatacctctatctgagaccatgaagcaaattcccgtcctccttgggcgtctatggtaccttgtcctgtaatggctatattagtggcatgtttggcataaatcatgggagaatgtccatatagttccgtaccttcccaacgtgtccatacttcaggaagaaagtcatcagccttaccgctgaaaagtagataggcgtctttctctaaatgtaaattgacatcacttttcagtactagatttccctttaaataatagattcctttcgaaattataacgtgtcctccgcctgccaaagaacaagagtctattgctcgctgtattaactggcgtgaatgacctttttggttggaagcggaatcagggcagatcacttttattttcttatgcggaaatgaagtgcgcgctatattggcaataatctgttcggctgtattttctattttattttgaggtccgtcatgtttgtatttgaaccattgaaatgaagttgctcctgcttcctgttctttgttataacaatatagtgcaatgcgggcacctttccaaaaaccgaatggaataaaaaaggaagttccataaggaataaaacgtatattatctgtactgtagaaatattggaacttttgattgagcatgtcgatggatacacgtagataaatctggtttccgtttaggaaagttgtacttatttctgttgtgtcattggatatgtatagatatttttgtcctttctccatcttgatacctagaactttattttcttttcccatgcaagctaatccgcatcgttgcccatcagctatttctgtaaaatccatagctattgtagcttcacttatattccccataatcttttgtgtcagggtgttgcgtgccagtctgaaggttgaagatttcaatgctttcagagtgagtgaacctggatgtgccgataaggaccatgcgtggtctgtcggattatgattaaactgccattgtagtgataggttgggggtagagaaatcatcatctgtttgcggagcgaatatggttttgctttcaatgggtttctggcatacatatacaggttctcctattccatttctatcaaagtctactccgataacgggccaatcgttttcccaatgcatgggctgaagatgaactacacggcctaaggcatgatgatgttggaaatgaaaaaaagcccattgaccatccggagtatcgacaatggctccttgatgagggccgtttatcgtagtacttccttgttccaatactactttcttttcataaggaccatatatattttttgagcggaggatagtctgccatcccgtacctactcctccttccggaatagagagataatagtaaccatcttttttgaaaatttttgttccttcggctacaggtccggtgtatacggtcattccttcatcaagtagacgtgtaccgtctgcactcattttatgaataatgataggcccggctccatgacggctccggcctaggtatgcttgaccatcttcatcccaaaaggggcaagggtcttcccatttttctactttcttaactaaatgtaaagggctccaaggacctgaaggattgacagcatttgacatgaataatccttctttgggagtacagaaaaagacccagaatttgttatcatggtaacgaattgagggtgcccatgaacctcctgcatattgttggttgttatcccagccgggaaaatcaaaatggtgatagatttgggaaatcagtttccaattgatcatatctgaagattccaatacttgcattcctagaaaatgaaagtcggaagctatcatgtaatatttatctctgacccggataacgtccgggtcagagtagtcagcatttaaaatcggatttatgtatgttccattgccctgatctccccatttaccgggagtaccttgagctgacaagactaatacattatttataaagtatagaagaataagtaaaaaatttttcatcagcatgttttttaacttaataaccagggttttgtgtcactttagcttgattcaaatcaatggcagcttgtggaataggacgaagaatcttgtatttaccatcagggcctatcatagcagattcttttatgccgtcttcattatattttgtggcatattccactaaagtgtgagtacgcttcaaatctgtccaacggacatattctccagctaattcacgagcacgttcatcaagaataaaatcaatattaatatcgttgctggtgacagtcatttctgttgtgtatcctttacgaatagttcctggacgttgacgaagtttattgatcatttgtgcagcctcttctgttttacccatttttaaataggcttcggcggcaatcagataggtttctcctaagcgcgctactaccacatcatgcatgctgcaagtagaattacggttagcaatagaagtttctgaataatcatcaaatttcttgatacaagcattgccgtagtcttgtgaacgacggtctttgtatgtggctggggcaccgttggatggagcaataccaccgtctgctattgttttgcttaccagtgtattctttttaattccataaggatcgtctgctttccaggcagcgatatcttcatctgtagcccatgctggagcataataataaatgatagaagaactagtcggtgctgagtaatagtcgaaataactggtatggaattctaacataaaagtttgttccaaccgtgcatcaccccgactatacatttgctgtagacgtagtgaaggagcaaagcaaccgtcaattgccttatttcttggtttttcggaaccacctaaataagctccgaattgggcttgttggtaggaaccgtcttttacgggatcttctacagcagccgaattaaactgtatgctccagaatatttcattgttttcttcattttctacgtcaaaagcttcttctatggagaggaaaggaatttcgccattaattgcttccaaggcatacttagctgcatttgcgaagtctgaattttgagctatattttcttcttgggcttcgtaatcagtgccatctagccatccacgagtcagataggttttggctaagtaaaaggttgctgcgcgtttattggcacgtcctacaccggagttggcacgttccattaaatgggattcggaagaggctagatactcaaactcttcaatgatgaacttataaacatctgcaagactggcacgttcatgactcatttcggcatggtcaaacatttgtttgttcaaagctacaggcccgaactgttgcactagttggaaataataccatgcacggataaaacgtgcttcgtccacatattgcagtcgtacactggaatcttccgttatgtctccataagatataacgctattggctagctgaatacctttaaaacaacttacatagaaattttttataatgccttcatctgcagtgaaggtatattggctcatgactactccctgtgactttccgtctgcatacaggtctgttcccgctacgaataattgcggttgggcattataaagctcccgcagtgtggagtaagcgctgttagttaaactggcgaatcctgccgaagtctgataaaattcagctgatggaacattagatttgttgttttggtcaagaaaatccgaacatcctgagagagttgccaatcctaatgccataatgaaatatatttttttcataatcatttaattttagaattttaaatttacaccaacttgataagttcttgaactgacaccaccggtaccatcacctacttgtgcgtcggcccattcggggtcgaacccttcataatttgtgaaagtgaaaggatttaatatattagcatagattcttaaattggaaatatgaagttttgaaatccatttctgtggaaaagtatagccgagggtaatattcttgattcgaacatatgagttgtcaacgaaattttgtgctcggtcctcattggcaccactttgccagtatgcaccgcctcctttaccgtttccaccattggttgggaaggggtaactaccgtaatgagtgacttcttggtaggctatagagccatcagcacctagtatcggagcaccttgaggtatatagtaatccatgtttaggcgattcatgccacgctgtccatagtctacgaactcggccatgaagggagagtataccattcctccctgactggtgtaaatgctgaaagagaagtcaatgttcttataggacaagttggaggtgaagttaccggtccaggtcggagcacaatgtccgaggatcattttgtcattggcatcgatagtaccattgccatccttatcatagattttcatctcgccttcatagaatttggttttcattttcgggtcttgggcataagcttgggcttcctctcgagtacagattccggtatatttatagccgtatactacgtctatagggtgattgataaaccatttgttacccaccaaatcttctttggtaccattcaattctttgatagagttaatgttacgcgcaaaagagaaggttgtttcccagttccaatctttattctttacgttgatggtattcagttggatttctatacctttattgttcaccttacccacattacttacaatggagcctgtataggaacctagttcaaatggggtttccatctccatcaagagatctttggaatctttgttgtagatatcgatagatccattgatacgattattcaagaaaccgaagtcaagaccgaggttgatttcggttgtcttctcccaagtcaggtcggcgtttgtcatggtataaccataaccgttggcaacagacgatccgtaattatagtaatatttaatatttgccaaagcttgtgtgtcataaggccctacaccggcattattaccggtaacgccaaagctggcacggagttttaaattgcttaaccatttgctggcaaatcccataaaatcttcatcggaaatgcgccatgccatggcagctgaggggaacatcccccaacgattgtctttttggaatttggaactgccgtcccaacgtgaagatacagtcagcatgtatttgcctttgtaggcatagttgatacgggctacataagataacatggagatttttttataatagctagactgactttgtacagtgcctgaaccaagattatgccagtttacatcaaatggcatatccactacattgatatagtcgccttgtaacttttgttcatagacactgaataaggccaaggcattcagactatgatctccaaaattcttgatgtaattggcttgcgtatcccaagtatacgagaatatttcatcattatagttttcggccatgtttgtttttccagaacgaagttgggtttctccgttatagaatgtaccacgatgggttttggtatacatgggggagaaagtagttttaagaattatttctttaacggggctgtattgcaaataaatatttgccatcacatcataagaacgtgtatcgtcttttgagttcaaacggtccaccactggattgatggaggaagtcggaccaccaccattgggatagatggcggtatctttacctggttgtgaaattaactgtcctgccttttccccttcccaataatagcatggcatattaggggtcatacggaacccttccaaaatagagtagttgctaccactctctttggatgctgttgccatatttgtggagaatccggctgagattttatctgaaatcttatgatctacggctccttttatattccagcgttcataaccgtcatacatgattccttcttcattttgataccctagtcctacgcggtaggttatattttttgtatttccggaaatattgatgaaatgattctgttgtgagccgttacgggttacgatatctacccaatcggtgtaatttttattgagatacatatctttcactatttgactgccatttccccagaagttcaggaaattggcatcagtcatttcccagttagtcattcctgaagaggcatccatagatgaaactagataacgggagaaacggaatttcatgaaatcatctccttccataaagtccggcatattggctttggtttttataccataatatccatcataactgactgtagtcttggctatatctttgtctccttttttggtggtaatcatcactacaccatttgtggcccgtgaaccatagatagcggtagatgaagcatctttcaaaatgtctactttttcaatatccatcggatttagaaaatccatattttcacaaactactccatcgattacatataatggattgccgccatttaatgaacttttacctcgaatctgaatattgaatccgtcaccggcacggctagaagactgtgagatattcactccggcaacttgcccttgtagactttcgacaactgatgttgcacctttggcagaaattgtttcggattttacactacctacagaacctgtaaggtctgatttctttactacaccatagcccactactaccacttcatctaacaatttgttgtctgcttcgaccgtgatagctagtttttgctgctctcctacttttatttcctgtgttttataccctacatatgaaacaactaagattgcacctgttggaacttccagtgtgaaattaccatctaaatcggttaccgttcctaaagtagttccttttaccaatacggaaacgccgattaatgcttctccgctttcgtctatgacactacctgtaatgattcggttttgttgaattgatttttgaattgatgaacctagttggtttgaccaattgtttgcaaaagtggataatggtaaggaaactagtcctaaggaaagtccgcaagcaaaccaaaatctttttggagaatgaataccctgtactataacagagcgggattttaaatactctttttttctcatgtctttcattattaatttagtattagagttgtttttgttttgatgtcaaatataggcggatgttatctttttataagtggaaaaactgataatttagttggaatatctatcaaaggtagctaaacaacatatattgcggtggattaaaaatagaaagtactttgatgaatacccattttctgctaatttcgcaaaggaaacacattactttgatatgaaaacatactgggttgatattcttacctttttctgtgtagtaatactatgcttttttacagccgatgtactggcaaaaggagctatatctcaaaaatattcagttacgtacttttccagtcagaatggagtggaggatgggctggtcaatgatattatccaagatcataaaggtttgttatggtttgctacttggaatgggctttatcgttttgatggttataattttaagaattataaatcgaatatggaagatctgggaggattgaccaatgatcgtttattggatatagtcgaggataaattcggatgtatatgggtattgtgttatgattccacttgttatcgttttaatcctgacaaggaagtctttgaacctgtcattcaaaaaacagtcaataactttcggtcaatatctgtccttccgaatggaatagtatggttattatgtgaagatgggagtgcagtacgggtcgttacggctcctgaagatttatctatgacatttcaattctattcatcaagagaaaatactttggctactggtaaaatccggtctgtatttatggattcgaaattacaggaatggcttcttacggatgagggggtatatcgattatatgattcagaactttctattatttctttgtctgattgtcgaaaaagtgagaaaatacctttttattttgcaacagagttggaagaatatatatatttaggtgcacatcaaggcaaagtctataaatacttgttgacaggagaactttctatccatactcaattgccaacatcggcttctgtgatttctattttgccttctgtggctggactgatatatgttactgattcggatggcttttttattcatgactctctcggtgagataagacatgtgatgcttgattctctttctctgttgaaagacaaaaacatagagtctgctaaaattacttgtggagatttattgtggcttgtacatcctgttccgggagtcactttgtttgatctgaaaacacagcgtttaagctttattgaaggaaaggatgaacagggaagaccactaaatactgaaagtgatttttttgcttttgaggatcggaatgatattttatgggtacaccctaagggcggaggattttcttattttgattctcaaaataggcggttaataccttttaatactacggagcagcctgtcaagtggaaatcaaatgaccgctgttttgctgcttttgttgataaacaaggaaatttatggatgagtacccagctcaatcgacttaagcgcatcacttttatccctgataaatttcatatctatacacctgctcctcaggatgtagagttacctgataatgagatcagggcactgtatatagacaaaaaacaacgtatttggacgggaagcagagatatgaatgtttccatatatgatgcccggcttcgattattgaaaaggatgaaatggggcaaagtatatgccatcatgcaagattcggctggtgtttattggatttcgactaaaggccagggattgataaaagcaatagaaacttcacaaggcaattttaagctacagcattttaaacataaagctgacgacccctattcattgagtaatgataatatctattttacttttcaggatagtaggcagagactttgggtagctacttacggaggtggattgaatttgattgaaactatgcctgatggtactttaagatttatcaatcatcgcaatttgttaaagagatatccgattagtcatttttataaagtcagacatattactgaagataatcaagggcgtatctgggtgtctacaacagcgggaattttacaatttaaggtttcttttcattgtcctgaagaaatagattttcattctatatgccgtgaacagggaaatgtgaatagtcttagtaataatgacgtacaaatgattcaatgtatggataatgggaacatttttgccattacttatggcggagggttaaatgagctttctcccatggggctccattcttatcaatgtaaatccttcacacagaagaatggacttatttcagatattatttattccatgcacgaggataaacaaggaaatttatggttggtgacgggtggtggattagtgaaatttgtagcttcggccgaacagattcagtattctagtgagcatatcgcgtttaatatgcattttagtgaaggtgtaggggcaacagatggcaagcagattttttttggtactaaccgaggtttgttctattttacccctgagaatattcataaaacagattttataccacaaatatttttctcttctatttgggtaaacaatcaggaactgactcccagaaaaactccttctattttgtctgttaatcctgataatagcaaggatatgcagttacctcctaataatcacaccctcaggttggtattctctgctctagacatgaccaatacggagtatattcaatatgcttacaagttagacggttttgataaaaactttcgtttgacggataacgggcatgaggctaactatactaatcttcctccgggaaaatatgtatttcgtgtaaagtctaccaataatgaaggtgtatgggttgaaaatgaacgaacactttcttttgaagtgcttcctactttctctgagacaccttgtgctactatgctctatttctttttgattgtattatttattgcagttgccatttatgtatataccgttttttatcggataaaaaataaggctaaaaatgaagaattgattactcaattaaaactcagcttctttactgacgtgtctcacgaattaagaactccattaacattgattaccggacctttggaatatatactcagagacgaaagtctttctgggaaggtgagagatactttgaagattattaaaaagaatagtgaccgtatgcagaggttggtagggcagatcttggattttagtaaaatccagaatagcaagatgaaactgagagttcagtatgtggatattatcagtttcacgaaagaaataatcaactattttacaactttatctcaagagcggcatattagtttgaattttaacactcaattgtctaaagtaaatctttgggtggacaaagataaattagagaaagttatttttaatttgctgtctaatgccttcaaatacacttctgatggcaagaacatttgggttagtatgaaagatgatgggaatgcagtccttcttcaaatccaagatgaaggagtagggataaagagagaaaagcagaaagtgattttcaatcgttacgagaatgtggttccggatagcatttacgctcctttaagttctggtatcggactttcagtggctaaagaacttgtggaaatgcatcatggtagtataaatgtggaaagtgagtacggaaaagggagtctatttactgtaaggctattaaaaggtaaaaaacattatccgtctgacacggaatatatattatcagattggaatgaagatacaaatttagatttcaattctcaaaacgaactacaagaattgaatgaagcggagaagccgctcatgcttattgttgaagacaattatgaattaagagtatttatcaaacaaatatttcaggaagcatatcggtttgttgaggctaataatggcgaggttggattaaaaaaggctttttctgatctgcctgatatgataattactgatatcatgatgcctgtaaaaagtggtctacagatgttgcaggaactaaggaacgatgaacgaacttcgcatattcctgccatagtattgactgccaagacagatatggatagcattctgactggtattcatacaggagctgatgattacataacgaagccgttcagtgttaattatctgcaagctaaagtagaaaatatcctagctcggcgtaaaatgttacaagcatattattgtaaagtaggatatgaagaggggaacgaaaataaagaaaaagacagatcggttcaattgtcggcaagagacgctgcttttcttaataagttagctaaaattatggaagagcaacttggtaatccggaattgaatgtagatcaattggtcagttatttcagtctgagtcggaccaatttttttcataagttgaaatctttaactggtatggctcctataatgtatataaaagaaatacgcatgaggaaagctgctgaactgattaaggaaaaccaatatacaatggcggaaatagcttatatggtaggttttagtgatcctcattattttagtaaaagttttaagtcttattggggaatgacttctacagaatatgcaaaaaatcagattggacgatgaagataaatgatagtaaagttatgttttatcattatatcgggtgaactcattgttcacccgatataataagggggatcttattttctcaccttatttccattgatatatacttcattcagtactacatctttagctccggtaattaaattcccttttttctctacattattgaaacggctgtttgttacatggatatcttcaatattgacacggtcgtcatatccggtaattaagactccgtacttacttttttcactagtaacattatccagatatacatggcgtactacaggtgggaaacttctgtcacatttttcacggttttcatattgcaggttgattttcaaaacggcttcgcgacattcgcctacttctatattacgcacataaatattttcaatgaccccaccgcggcagttgttggttttgatgcggatgacacgttctaggttcggactgtccattttgcagttttcaacaaacaggttcttatatcctcccgagatctcactacctacaactacaccaccgtgtccgtctttcatttcgcaattgcgtacaatgatattttcacttggtacgttccatttccgtccgtccgcattccgtccgcttttaatagcgatgcagtcgtctccagtatcgaatatacagttttcaattaatacgttcttacttgattccggatcgcagccatcgctattgggaccgtgactggatactttaaccccacgtactgtcagactttcacaaaataaaggatggataacccaaaatggagaatttttcaatgttacattttctattaaaatagtgttacaacgatatagattgataagctggggacgtaaaccgtcttcaaaagtcatttggcgtttatctatcggggcaaatgtttcggcgtacatcagtaatttgtttctgccgccatttttttgagctgtcataccttccttccagccatagtgtggagcaccacacatactccaccagttatcattactggcctgtccgtctataatacctttaccggtgatagctatgttactttctccataagcataaattaatggatgcaaattgtaacagtctactccttcccagcgggtgagtacggttggagtatatagatatttctctgaagaaaattttagataggcgccttcttccaaatgcagatttacattgcttttcagtgtgataggacctgttagaaattctccgggtggaactaatacagttcctccacctgcttgactgcatgtgaggatagccagattgattgcttcatggcagaatatttcaccattatttccttctttggcaccgaaatctttaatgttgtacacacgatcgggaaaagaggtctttttgatttgtttttctatttgctcactttctttccaaatctcttgtggtatttgtgcatgagcaagtccaaaatatgcacatatacaaaatacactaactaacttttttaccatatatttgatgtttaataattaataatttcatagttgccagaaaatatccacgatgcaatattaaagcatataattaaaaaataagtggattaattgcccattattgtgtaaattctaataatgaaagaataattgctgctacattgctatattatttgtatattcgtaccttaataatctgatattatgaaatatatcacttgttatatactgatatctgtttggggatttttgttgttataggaagtagtatttctactaccaaagatagtcttctgaatattataggaagtcctgtagagttttctctacaaattgagatttacagaggtttggctgatttttattttgagaaacctgaagaagtggattatcttaataaatgtatttcaccgcaaaagcagtaaatgataagactcatatgtttgaggctctttctgatttggttttctcgtatattaaagtttatcatgccgattctgtttggtattatatgtctcttttaaaggatgttgggacactggaagaatctcatccatatttattctttttacgaatgagattgtttgcaggcagagtcaggaataatgaggttgaaactgctataacagaggaattggcttttatgggtaaagaaaatataggtgggaatgatatttacatacagatggaacagacttttattacaggctatgctttgtgtagtgaaggtaaatatgaagaggctgatccctatttggaaactgcttataagctggcttgtcagttaccatatgaggaaggattcaagtttcgtatttgtactgtatggaattttctttcgaccttgaactttatagataaaggagatctatatattgaatatgttgaaaaatagcttcagcaatatagaaaatattatgagttgtactatgctcgtcaacgtcctttctataatattaatatacgatatctccaatgttatacttctttgttgatgcgtgcggataaattatccgatgataaattagagaagtattataatctgatgatcaagatgagtgcttgggttacggagcctattgataagtataattgttttttggcatgaataattattacttatataagcataatttccataatgcattgataactaatgacagcttgataaaatatgcttggatgacaagtcagtctaatgtcccgggattattggatatcaattcacaaatttatgaggctatggaagataataaaaatgcttttaagtatcataaactctatatacaagtgcaggattccattaaatcttccaatctgaaaaaacaacttagtgaactacaggtaaagtatgaagtagatcaattgaaccatgagaattaccgtttggaaactaagaacaggcgtattttagtaattacactttttatggtacttgtattggtgatgagtatttgtttttacttgtactatgatttgaagaaagacagatggaaaaagttttaggtgaactgaatcaaaaagctggggaaagtgagaaaatgaaaacagcattcattaattctatgtgtcatgaaatacggactccattaaacgctattgttggcttttcaggtattattactgctaatgcggaaattctcacttcgttgatagatcacttgctggtagtggctaatttagattcatctgatgcgcctcttctttgtgaacaaaccagataactcatatctgcagacaagaaatggataaagtagaacgatggagcagggtgggaataatttatcatttggaattaccagaaggggaaatttttgtttccaccaatgaattgtatttgtcgttagtgatagagaacctgttggataatgctaataaatttacagattctggatctataactcttaagatgaggttggataaggcacaaagtaagttacgaattgaagtaaccgataccggctgtggcattcctcccgaaaaacgggaggaaatatttctgtgttttatcaaactggatgagtttgcacaaggtaacggattggggttatatttaagccgtttaattattaaacgtttgtctggtaacatatttgttgactcgagttatactgaaggtactcggatggttatctgtttgtctgtataattagcgtgtgccttcttcaatgtcccgctttcgtttcagtgcttccaggaaataatagtctgcataatttaaaggtacatctatttctgtgccatgaggaatactgcccactgaatgcattaataaaaagttaccattttttccaagagatgccagatagtttggtgaggctagagaagccataatactgtctgcatagatcttataactgtttgcatcaggcacatccattgtactaatttcataaagtgcagaagctatacaagaagcacttgaagcgtctcgtggttcattgggaatattgggagcatccatatcccaataaggaatcaagtctttgggaagccggggatgtgttttcatgaattggaaagtcttcaatgcctgatttagatactttttatcatgagtttcccggtaacacacagtgtaaccataaatagcccatgcttgtccacgactccaagtcgattcgtctgcatatccttgggctgtttgtctatgccgtaccatgccgtctgccaaactataatctattacatgataacaacttccgtttgtacggaaatgctctttcaaagtgcggtctgcatggttcactgctatgtgataaaaagtggaatcaccagataatttagttgcttcaaatagtaactccaaattcatcatattgtctattatgaccggacattcccaaccgcgttccgattgccagcctcgggtcacatcccatgattggataattcccggcttttcacggaaacgagtagccaatgaacgggcagcttctatcatgacttctttgtatctgggtactttagttgttcgccatccattgccgaaactacaatttatcatgaaacctacatcatggtgccaagtcagttttttggcttcttctatggccgaagtgtatttatcagctaatgataagagagtagtgtcgccactcagttcatatagataccacactgacccagggaaaaaaccacttcgccagtcggcgtagtcacaataataaatggtactgtcagttttcagtgtaacggggtttgtaaatttttctgatttttctatgattcgtatttcattcccgatttgtgcacgtgcaaatgctacattcttttctataaaggaatctgttctgacggattgtttatttttctctgtgcaagatacccataaagtagagcaggtgagtattgtaatatagaggactttcttcatagtgcttattttttataatttgctacgaagataatgataaatttgttgaatagaaactttaagatattcttttactttggaaacagattgattctgcctctaaagtaaaagaatattgatcatagaaatacaataatcatttcagttgtgattcttcttgtaactaaaattttatagtattgatgtatcacttaatagttgatataccccacttataattcctaaagcgaatatgccggctacacataccaacagactgatgcgcatcggagttgctgtacgaaaattgccgataggatcttcattaggtgtgatgaacatggcttttacaattaacaaataataatacaatgaaatgattgtattgaccaatgcgataaatacaataagataatatccactatggaatgctgccatgaatacaaagaacttactgaagaatccggcaaatggcgggatacctgccaatgagaaaagagcaagtgtcatgaccatagttagtttggggttggtcttataaagtccgttataatcttcgcgttctattttaccgtgggtatgttgttcaatggtattgatgacaccgaatacggcgagattggcagcaatgtatactactatataatatactagggatgccatgccctgcggagttccagccagtacagccaacattatgtagccggcttgtgaaatactactgaaggccataaagcgtttcagattgttttggcggatggcgaacagattggctatagtgatggtggctacaatgataatacatagtatttcactccattgttcagtcattggcccaaatactttcattaaaataatcattaaagcaaaagcagctgcgccttttgaaataacggacaggtaagcgctcactgtagtcggtgcaccttgatacgtatctgccgtccacagatgaaaaggtaccaagcttaatttaaaggctagtccggagaagaagaatactagtgcaagaacttgtaatggagttcctgtcagttcggcagggatatcttcaaaatataaagtacctgttgtcccataaatcatggaaataccatagaggaaaataccgctggagaataaagctgaaagaatgaatttggctccggcttcggcactatgtcctttatatttatcgaaagctacgaggcaagccataggaatggttgccaattccaatccaaggaagaatagcaggaagtgccctgcacttaccatgaaatacatacccagcaaggtactgagggtaaggatgtagaattcgccttgtttatggcgggtgtcttcacgttttagccaagggtctgcttgtagaaaaaccagtatggtacctatggtcaggatgcttttcagaacagacgccataggggttgaatggtacatgccgccgaataaagtcacctcttccggccataggtttgctaagagttgaatggtcagcaggatacatgccatggggcgtaaccagtgacgttgtggagccggtaaaaataaatctaacagaaacatcagaataaaaacggctgtcagactcagttcggcatgcatatggagtattgcagttatgtccatcattgctattttttaatttttaattctcaaattttaatttaataattgacttatgattggttctacactgttactgatcagatcgcttatccagaatggagccaatcctaaacctgctacacaggcgatgaggcagataacggctactctttcatcccaagttgcgtctgtgagtttcagatgttcgggattcaaaactttgccgtaaaggattttacctactacacgcaggatataaactgcggtaatgacgatacttgttgttgccactagggtacatacgcgatggaatgtatcatcattttggaaagaacctacaaagaccgtcatttcagcaacaaaaccacttagtcctggaagtcccagattagcaagaccggcaataacataacctacagccaggaaaggcataatcttcatcaaacctcccattaatcggacatcacgggtgtgggtacgtccgtatatcataccaataagggcgaagaacaaagcggtcattaatccgtgactcaacatttggagaatagcacccgtacaactggtgcgtgtcatcatcagcagggcaaagagtaccaatccgcagtgggatacggatgaataggcattgatatattttaagtcggtttgtaccacagcactgaatgcaccgtaaactacagaaatagtggtcaatatcaggaatacatctccccacatggccgcaccttcaggcatcaggtacatagcaacacggaaacatccgtaacctcctagtttcatcaataccccagcgtgaagcatagaaacagcagtcggtgcggaagcgtgaccatcgggactccatgtatggaaagggaacaaagctcctaagactccgaaccccaagaagataagcgggaagaagatgcgttgcatttcatgaggaatatgtagtttggcgatttccagcaaattcattgtttcaccacctgcaccatagaaaataccgagaattccgatcagtagaaatgcagaaccacccattaacattaatgtaagtttcatggcggcgtattctttacgtccgcttccccacacaccgatgagcagatacattggaatcagggctacttcataaaacatgaacatggtgaacaggtctgttgaaacgaagaatccgaatacccctacactcaatagagtgaaccacatgaaatattcttttgtcaatggttgtaacttccacgatgcgaaagtaccggtgaatacaataatggaactaagtagcaacattgctactgatataccgtctactcctactgagtagcatatatggagcggtgcataccaaactgtgctggctgtgaacagcatctctcctgtagcaccggcttggcgtagttcgatataatcaatggtgaggtaaacggataatgccaataaaatggaagatccgacaaccatcactccgcgaacttgattgatgctgcgcgaagcccaaaggctcgcgagcatcaacaagggaactataatgaaaaaacttagtatgttcatctttttaaattaaaaattaaaaaatggccatgcggcggattttttattattcattaaattaatagtatcagcgtcaatatcaatgcacctgcaaggaaccaaatactgtattgctgtacgtttccactttgcatgtcacgtatttcatcggcggtagcatgagtactccacgcagtgaagttaaagaattgatcgataacgtgccggtcccaccaagctatcggagtactaatgcaccggaagatgattttcttggttacgaataaccatatctcatccatatagaaacgatggtaagcggctgtgtgcaaacgtgggaatgtgtgtgccagatagttggctacgggttgtttcttacctgcatacatccatgtagctaaagcgatggatgctatagcaataatgatacttgtagcagctatctgcatatccagatgaatggtataggcttctccgttactactgatcagattgccgaaaggtatgaatccggcaacacaggtgatagcggctaaaaacatcagcgggaatgtcatggtaagtggagcctcatgcggagtatgtgcacctagtccggattcgtgggagtgtcctttccattctccattccagaaaatacaataataaaggcggaacatataaaatgcagtcatggcggcaatgcctgtcattatccatcctataacaggactgaattggaagcaggcggtcagaatttcgtctttagagaaaaaacctgagaatggccagatacctgagatagccaaacaagcaatcaggaatgtccagtgagtgacgggcatgtatttatgaagtccccccatggcgctcatctcattactgtgtacggcatgaatgatacatccggctcctaagaacaacaatgccttgaacatggcatgtgtgaacaggtggaacatggatgccatgtagcctagtcctccttcatgaggattcatggaagtacaaacgcctaatgcgacaatcataaatccaatctgagatatagtggagaaggcgagcacacgtttgatatcgctttgtgcacacgccacactagcggcgtagaatgcagtgaacgcaccgatataagctatccagtgcagtacttcgggcgcatatcctataaacaacgggaacatacgggctaccagatatacaccggctaccaccatggtagcagcatggattaatgcactgacaggagtagggccttccatagcatctggtaaccagatgtgcaatggaaacattgcacttttaccggcaccaccgataaacattagccccaaggccagtggtatcatacttccggcaactgcaagtacctgaagttggggtgtgaacgagaatgtttcggcataatagccgtaaatcaagataccgatcagaaagcctaaatcagcaaaacgggtaacaataaatgcttttttactggcggcaatcgcttctttcttggtgtaataaaagccgataagtaaataagaagaaacacctaccagttcccaaaagacatacatctggaaaatattggttgctactacgagtcccaacatggacatggtaaacaggctaagaaatgcgtagtaacgttgaaagcctttttcacctttcatatatccgaatgaatagatatgtaccatcagactgacggtggaaataacgactagcatcataacggaaatagggtcaagcataattcccatgtcaatatgcaagttcgttgtgaaaggtaaccattcgaagttataaggtgtgagagtaggatagacgccttctgccgtacggcctcctgcaaaataattgaaggcagtgaggtaggaaagcaacgccacccctgccagtgaaacggtgccgatggcccctgccagcccgttcttcatacgcatacctgccagccccagtatcaggaaactgaggaaaggtaggataaggattagtattgtatgttccataattagtttttcatttcatttaagttcttcacttggatattgcgtacattgcggtagatattgataatgatagcaatagctactgctgtttcagccgcacttacgccgatagcaaacaaggcgaaaaaaaagccttccagttcctcgggaaagaggtatcggttgaatacggcgaagttgatgtctaccgaattcagtatcagttctacactgatgagcatggccaataaattgcggcgggtgaagaaaccatagattcccgcaaacatcataaaggtggaaaccaccagataatattccatgtgtaccataaattttatctttttctagcgattaggattcctcctacgatgcaagcgagtaataacacgctgattacttcgaaaggaagaatatattgatatttttccatgcccatcagtgcatgaccgatagtgcgtacatccagttcaccatgcacaaaatgagagggcaagaattcatttttcagcatgacgaacagacagatagccagtcctgctatcgtagaaatagctccggccaccatcttcccatttttcaatctctctgctttgtctccttgtgaagaggtcaataagatactaaatacataaagcactgttataccaccggcgtaaatcagtaattgtacagctcccaagaatgagtagttgagctggaagtaaatacctgctgtaccaaataaaacgaacagcagataagttgctgcacgcaagatacgtgaggtcgtgactgccaataccgaacagacagcgataaacaacgccagtacaatgaatacaattagttgtagtgtcataatatcgtttgttttttattttttgttcagggtgagaactagtttgctgcggtcgaacacagcattctcgaattctgtatcgaaccgaatggcatcatgtggacaagcgttcacacaaagttgacagaacatacaggctcccagatcgtactcatactttaccaatattttctttttcttgcctgtttcttcgttggtcacagattcgctggtaatggtgattgtatcattggggcaagccatttggcaaagtccgcaagcaatacatttgttattaccattctcatcaaccggcatgataagccgtcctcggaaacggggcgatatttttaatgtggcacggttttcgggatattgttcagtgactttaggagtgaaaaactctcgtcctgtcactttcataccggtaagtaatgtaccgatgccatgaagtagtccttttatataggaatgtttttcttctttcatcagaaatgtaatttaaatacaacaataattaccatcaacagcaggttgcacaaacctattgggaccaagtatttccattccagtgttagaatttggtcaatacgcagacggggaaatgtccatttgatccacattagtaaccatacaacaaagaatgacttgccaaagaaccaaataaatccgggaatataatccataatggcattgaatccgtctagtccaggaatatgtagcggcatccatcctcctagaaagatggttgtggctactgcggcgatgataaacaagtttacaaattctgccacatagaacaagccgaagtgcataccggaatattcggtatgatatccggcggtcagttcactttccgcttcaggcaagtcaaacggtccgcggttgacttctgcatttccggctatcagataaatgataaaagcgatcaatgcaggtatatgtcctttaaaaaggaaccagccgtcagcttggcgttctacaatttcgcttagttgcatggtatctgttaagattacaatagtaaggatgcttaatcctacagataattcataactaatcatttgagcgccacttctcatggctccgattaatgaatatttgttattggaactccaacctgccagcaaaatacctactacgccgatactggatgctgccaataagaagaaaatacctacattgaaatcaaggacctccatgcccttgttgatgggtaggcaactgaaagccatgatagaggcgaggataacaatgtaaggtgccaaattgtacaggaacttgtcagcatgtcggatggtgataatttccttaatcaacatcttgaatacatcggcaaatacctgtatggtaccttggggacctacacgcattggacccaagcggcattggaaagcggcgcacactttacgttccatgaaaatcataatgatagcaataactgcgtatgccaacatgatacatacgccaattactatacattctatgagcactgccagttcttcaggcataaatgacgtgagcagtgagtgtacccattgggtgactatattaaaatcgaacataatttaataatgtgtcaatttgctaatttgccaataggcaaacttgtaattatttaatttgttaattctcagtctgataaataatgcattcttcaagtagtatattgaagaattggcacattattatcggtcaatatccggtactacataatccaccgttccaccaatagcaattaagtcggcaatttttgcattgcggcacatagtttccattgctgatactaaaggtaaaccggtagcgcggaatttcatgcggtaaggaaatttgtctccatgactttccagataaaccccgaattctccgcgagaaccttccacggcggcataataatttccttcgggcacgcgtataatcggtttcatcttttcctgatagttcccttcaggaatattgtctatcagttgctcgatgatgttcatactttccagtatttcttccatacggaccatgtaacgtgcaaaacagtcgccttcggtgtggacaatttctctaaaatctatcttgccatacatcgcatagggatgacgcttgcggacatcacatgcccaaccgctggcacgtcctgtacctcctgttgctccgaaagagatagcgtcttcccgtgaaagaactcccacacctttcaaacgttcttgggcaatgacatttccagtgaatacttcatggtattcttttagcatcggatgcagataagcaatgaattcttttactttctgtacaaaatccggagcgatatcagcttgtactcctccaatggtgttatagttctgtatcagacgtcctccggtagttgcttcgaagatatccagtatcttttcacgatcacggaatccatagaagaatgcggtcaaggcacccatatccatacagagacaggagaagaaaagcaagtgagagtctatacgttgcaattcgtccataatggtacggatgtattgtacccgttcgcttacttctacgcccattgcctgttcaatgcacatacaaagagcatggcggttctggtgcgcacctaaataatccaaacggtcggtcagggccaaggtctggggataggtaagactttcgcacatcttttcgatacctcgatgtatgtatccgcagtgtacatccagtttcttgataatttcgccttccagtgaaacgcgaaaacgaagtacaccgtgggttgccggatgttgaggacctatgttaatgatatattcgtcctcatcaaaaatggtttctcgtttttctattacactgccatcatgttgcacctctatatattgtgttgtatctacagcctcctcattggtcatacggagtgggttgaggttttcatcgtagtccttacgcaatggatagcctacccagtcatcacgcaggaacaaacggcgcatatcaggatgtcctataaagcggataccataatagtcgtatacttcgcgttcattgaattcagcacctttccaaatatcacttacactaggaagctccggtttttctcggttggttgtgcgagtgctgaccactatgttttctcttgtcttcgtatcttccagatgatagactacacctagtccttcttcgccccagtccattccggtaaggctgcgtagaaaatccatatgtttaccctgccgcaatttcagcatttcttcatgtagcttttcggcaggtatttctattttttcactcatgcttgttcgggattttgtggttcattttctttgcggttcactccgccaaagaatttttccagttttactttacgttgcaattgtatcatgccgtataacaaggcttcaggccgtggcggacatccgggaatatatacgtcaacgggaagaattttatctactccgttcaatacgtgatatgattttttaaaaggaccgccgctaatggcgcatccgcctactgcaataacgtatttaggatccgccatctggtcatacaaacgttttagtaccggagccatcttgtgtgtgatagttcctgctaccatgatcatatctgcctggcgcggactggcacgggctacttcaaacccgaagcgggcgaaatcataccgggcagcccccactgccataaactcaattccacaacaactggttgcaaatgtaagcggccacaacgaattgctgcgtccccagttgatgaggtcgtccaaacagcccaccaatacttttgtaccgctttcattgagctgcttgaccatgttttccaaatactcattgtttttgaagtcttcataaggaatagactttatggttggtttctttacttccattccaacgctcctttcttccaggcatacgccagacctaaaactaatataactaaaaagaaaaggatgctaaacagaccgtacactcctaggtcttgtaccactacagcccaagggaataaaaatactgtttccacatcgaacatcaggaagaggatagcaaatagatagtaacctactttgaattgcatccacgaccgtccccgtgtaggaataccacattcgtaggcttctcccttttgtgagttgtatgaacggggagaaatggcacgggcaatccccaatgctacggcaactaatgcgattgccgtcaagataacgacaactaataatgtaaaatacatatctaaactttttttgattagacaaacggatagaaaaatagtccttataagacgtttgttataaggatttctactcagcgaaatgctgaaaaaaaattaaaaattaaatgatgatccgccggagtgcatagatataataatctacggcatcagtgtaaagcgaatgaaaggtgtggcaaactatatggtttgtttgtagctcttgctttttaagttcgctcaatgctgttaaaatgcggactatacatttaaactttgatgtggaagggttgtcaagtgatatggctatttgtggcatatctgcaaaattgttggtaaacaggaaatccactgttcttttgcaagggtcttgttgttgctggtaacaagatgtctgtgggtgtagatctgtcggttcaaccgtataatgatcctgatctactgttatcgtaaacagtagaaataataggatatatacaacgtatctcaacatattattcatcttgttacccttttaatgagggtgcaaagatagccaattatttgaagcttcattgagattttttgaattatttatgtataaaaatggttataggaagtgaatgtcagtgctttttccaaaaactcggcataaagagcagaagtacggtaaataactccaaacgccctattagcatcagtattgcgcttgtccattttgctgcatccggcaatccgctccatgaataggacggaccgcattttccaatacctgggcctacattgcccaaactggaaatgactacgctgtaagcttcttcaaatcctactccaaacagcataagaaccagccatccaataaaaataattgccatatatagaaaaatgaatgcaagtactgctgacttggttgttgatgaaacaacttggtggttgatacgtacaggaagtatagcattgggatgaatgatatgtttgaattcatttttagaaatacggctcataatggctatacgtatacattttattcctcctgtagtggatccggcacaagctccgaacaacatgatgatgcacattaatgtccaaagtacaggtacccaggtcatataatctgcagaaatgaatccggtagtggtttgtaaggaaacaacctgaaatatggctttacggaaagattcctcaatactgaacggactggtgaaaataagagtgacggtagtgaaaagtgtaaaaaatcccactgttcccaaataccagtggagttctgtgttttggaataagcgtttaaaatttccttttaagaataataaatataacaaggtgaaattaatgcccgacaagaacatgaacaaggtaataacatattctatataaggagaattaaagaatgcaatactgttttgtttggttgaataccctcctgtggcggcagtggtcagagaatgacatacactgtcgaaaaagtccatacctccggcaatcaacagaataatctcggcaatggtcagtcctagatagatagtccagatccatttggctgtaacaccaatacgcggatgtactttatcatgggtggggccggtggcttcagcagcaaataattgtacactgcccactccgaagatcggtaatacggcaatagtgaaaaatacaattcctaatccgccgatccattgtgtcatacttcgccagaacaaaagcccgtgtggcaatgactctatattgttcaaaatacttgctcccgtagtggtgaaccccgacatggtttcaaagaaagcgtccgttatacagggaatatatccgctcagatagaatggaagcataccgaataaagaaaaaaagacccatgcgaaagttacaataacatatccgtcacggcgactgatcttcttttctgcatttttgccggtcagagaggctatgatgcctgcccctactgtaattgctgtagaagttaggaaagcggaaagatccgattcattataataaacagcaagaaaggagcatagaataaggaagcctgcttctatgaagaatagagaacccataatccgggctatcatttttgtgtttatcatcaattgaagaatttttctattttcttaatcatcatccctaaacagaataccacaacatggtcattgggttgaataacagtattacctgttaccaatataccttcgccattgcggatgagtccgccgatggttgcccctttgggtaatccggcgtctttgacagcgcatttggtaatacgggaaccatttttgactgtgaattcagccacatcagcattagcgaaggtcagacattttacattagaaacatcggcgtccagcatcatttggtaaatatggctggcggcaatcatctttttattgataaccgtaccgatatccaagctttctgccatactgatataatcaatattttctacttccgccacagtcttggttactcccatgcgtttagcggcaagacaggccagaatattggtctcagaattgtctgtcaaagcgacaaaagcctcggtattccttaatccttcttccatgagtaaatccatatcccgcccatctccgttgataatcattactttttcgtccacagcttcagtaagtcggttgcatctgttgatgtcattctcaataatcttgacctgcatataatctggtacgtattgtgtggtgcgtacagcgattcggctgccgcccataatcattacattgcgtacatcgggataagtttcttttcctgctattttacggatataaggaatgtatttctttgttgtggtgaaataaacaatatcatgcaatttgatagcatcgtctccacgggggatgattgtttcatttccccgcttaatagctacaatatggaatggaatattacgtcctcccagttcatgaaggggaacgttcagaatttctgccgtttctcgcattttggtacctatcaggactagtgcaccgccgcaaaactcccaccactgacgtatccagctcattttgatggcatctactatatctttagcagccagcatttccggataaatcagtgagtgtactcctagttgggaaaagaattctttatgtttaggaagtagatattcgtaattgtcaatccgggctacagtctttttagctcccatattagtagccaacatgcaggccgtcatattgcggctttcttctggcatgaccccgataaataaatctgcgcctgccactcctgcatttttaaggccggaaatggaagtgggggatgcattgacagtcattaagtcgaagttggaatcaagtttgctcaacttttcttcgttttcatccatcaaaatgatgtcttgcttttcatccgataataatttcgccaaatgggtgcctactgctcctgctcctgcaataatgattttcattgttcgtctctcttagaatgatatcaaaattttgtaaataccttcttcgtccatgccgcaaatatgatatagttcttttactgaaccatgctggacaaatagatccggtaatccgacacgttttacttgtggattgtactcattatctgccataaattccagtatggcactgcccattccaccttttagcacaccatcttcaatagtgaccacttgcttgaatctcttgcctatttcgtgtaacatactttcatctaacggcttcaagaaacgcaaatcataatgggcaatgctttttcctgtttcctgttcggcatgtgtgatagccttttctgcttgaacaccaatgggacccagtgtaatgaccgctatgtcttttccttcttttaattttcttccttttcctatctcaatctcttgcattgggcatttccagtctaccaatgaccctcttccgcgtggataacggatgacaaaaggacctttattgggtaactgggcggtatacatcaaacaacgtagttcatgttcgttgtaaggggaggctacaatgagattgggtatcggtctcatataagccagatcgaatgctccgtgatgagtaggaccgtcttcccctactaatccagcgcggtctaggcataatactacattgagtttttgtatcgctatatcgtgaatcacattgtcataggcacgttgcatgaaggacgaatagatattgcagaaaggtaataggccatcttttgccattcctcctgaaaaagtaacggcatgtccttcggcaattcccacatcaaaacctctttcgggcatggctttcattaatatgttcatggagcatcctgaaggcattgcgggagtaactcctacgattttatcgtttgtttgggctagttccaatagggtatttccaaaaacatcctgaaacaaagggggcattcctttggtatcgacaacgatacgctctccggtttctttgtcgaatatgcctggagcatgccagatggtggcagctttttctgccggaccgaaaccttttcctttggtggtatgtatatggagtagtttaggtccttgcatatctttaatctcttttaatacacgtgccaaattgttgacatcgtgtccatcaataggtccgaaataacggatattcatgccttcaaatacattttgctgttgtaccagcatggatttcaggctgttgttaaatcgtatcaggcttttccggcgttcttcattcaggataccccatcgatggaacatttgtgatattttatagcgtatccggttgtatccttcagacatttgcaggttcaacagatattgtttcatacctcctacactacggtctatagccatattgttgtcattcaggataatcagcaggttattaggagttgacgaggcattgttcagtccttcgaaagctagtccgccactcatggaaccgtcaccaattacggcaacgacatgccggttgttctctccgtgttttttggctgctacagccatacccaaagctgcggaaatagaatttgacgcatgcccgcaagtaaatgtgtcatattcactttcggatggagaagggaaaggacgtatgccatttagtttacggttggtgcagaacgcatcccggcgtccggttaaaattttatgcccgtaagcttgatgccctacatcccatacaatgcggtcatagggcgtgttgaatacataatgtaaggcgacggtcagttctattacgcccaaactggaaccgaaatgccccggattacatgagagctcatctataatcttttgccttagctctttacacacttcgggcagtttgtctgcgcttaaatgacgcaaatcgtccggagtatctatgctttgcagcaagttatataaattatcctgttccattcttatgatatgataaatatcgtgcaaaaatagcataaatatgtgtattatgattacatttgcccttaaattttaaaagcttttcttatcgtatgaatttcagaacgcaagtagaattacctaaaagggaagcagaaatccgacattcggatcgaatcatgctatttggttcttgttttgcggaaaatatcggaaatttgttgttaacaaataagttccgttgtgatgtaaatccttttggaattctctataatcctttatctgttgtggaagctctttggcaaattctatcccatcaaacatatatggaagaggatttgttctatgccggaggctgttggcacagttggatgcatcatagtgttttttcagcctctacggcagcatcttgtttatcttctataaatactcggctggcacaggcttcagccggacttcctcagcttgattggctggttattacttgggggactgcttttgcttattggctgaaagaaaggaccatggtggtaggaaattgccataaacagcccgacagcctttttacccgacaacttcttacagtagaggaaattgtcactgaatgggaatgtgtgttggtggaattgagaaaagtaaatccgtccttgaagatacttttcactgtcagccccatacggcatagcaaagatggtatgcatggtaatcagataagtaagtccactttgctcctcgcagcggatgaattgtgccgccgctggtctgattgttactatttcccttcttatgaaatcatgatggatgaacttcgtgattatcgtttttatgcagatgacatgttgcatccctctcctgtagctgtatcttatctatgggaatgttttacagaatgttattttagtaaagaaacggatagaataatgaaagagtgggaggatatccggaaggctttagctcacaaaccgtttaatgcccaatctgaaacatatcgtaaatttttaactcaaatagtgttaaagatagagcgacttaaagaaaagttcccgtattttgaccttcaaaaagaattagaacaatgtcaagctcgattgaaaatatagaaaaagttctgggagcaaagcggtttggaaaccgtagtgcacagattgattggattttaactgatagccgttcattgtgttttccggaagaaacattattttttgctttaaaaaccaaacggaatgacgggcataaatatctttcggaattgtatgaacgtggagtccgtaactttgtagtgggtgaattgccggctgatatgcaatcttttcaagatgcgaatttcctgcagttgaccaatcctctgaaaggattacagaaattggcggaaaaacatcgggagcagtttcagattccggttataggaattacgggaagtaatggaaaaaccattgtgaaggaatggttatatcaattgcttagtccagatcgtgtggtaacccgttcgccacgtagctataactcacagataggtgtgccactttcggtgtggttgatgaatgagcacactgagttggctatttttgaagcgggtatttccgaaatgggtgaaatggaggcgttgcagactatcattaaacctactgtgggtattttgactaatattggtggtgcgcatcaagagaattttttctctttacaggataaatgtatggagaaacttactttgttcaaagactgtgacgttattgtttatgatggcgataacgaattgataagttcgtgtgtggcaaaatctctttttgcctcgcgtgagattgcttggtcgaaaaaggacaatgaacgtccgttgtttattgagtccattcaaaaaggagaacatgctaccactattaaataccgttatttggggatgccgaatgaatttagtattccttttatagatgacgcttctattgagaattcgttgcattgtctggctgtggctttgtatatgatggttccccctgaacaaataaccgagcgcatggcgcgtttggaacagattgctatgcgtctggaggtaaaagaaggcaagaatggctgtgtgttgatcaatgatagttataattcagatttggcttctttggatattgctcttgactttatgtcgcgtcgttctgatgataaagggaaaaaacggacacttatcctctcggatatgcttgaaacaggacagagcagcaaactactttatcgtcaggttgccgaattggtacatagccggggagtagagaagattgtcggggtaggagaggaaattcggactgctgctgcccgttttgagatagaaaagtatttttttcgtactacagaagaattattggaatcggatttgctggccgggctgcgtaatgaggtgattttggtaaaaggttcgcgtgcttttcattttgaccggatttcagatcgtttggaactgaaagtgcatgaaaccattttggagatcaatttgaatgctttggttgataacttgaattattatcgcagcaaactgaaaccggaaacaaaaatggtatgtatggtgaaggcttctgcatacggtgccggttcatacgagatagctaaaacactgcaagatcaccgtgtggattacttggcggtagctgtggctgatgaaggttcggatttgcggaaagcgggaatcacctgttccattatgattatgaatcctgagttgacagcattcaagaccatgtttgattataaattggaacccgaggtttacagttttcatttattgaatgaactgattaaagctgctgagaaagaaggcgtaacgaatttccccattcatattaaattggatacggggatgcaccgtttgggttttgcacccgaagagattccagaactgatagaccgtctgaagaagcagacagctgttattccacgttctgtattctctcatttggtaggcagtgacggggctcagtttgattcgtttacgcgcagacagatagaaatgtttgaagctgcttctgaatgtttgcaggaggcttttcagcataagatattgcgtcatatctgtaatacagccgggatagaacgctatccgggtgctcagttcgatatggtgcgtttgggaatcggtctttatggaattgatccgtttaccaatcagattatcaataatgtaagtacattaaaaaccactattcttcagattcatgaggttcctaaggaagaaacagtggggtatagtcgtaaaggacatttggaaagggattcccgtattgccgctattcctatcggctatgccgacggactgaaccgacgtttgggaaatggacatgcctattgtttggtgaatgggcagaaagcgtcatacgtgggtaatatctgtatggatgtgtgcatgattgatgtgacggatattgattgtaaggaaggggataaagctatcatcttcggagatgatttaccggtcactgttctgtcagagattctggaaactattccatacgagatcttgaccagtgtgtctaatagggtaaaacgagtttattaccagaattaacgaaaaaaagaacgaaagaaaaagacatgaaaaggatgaacatacgttacttttgcgtatctttaggaagttactaaaaatagatagctatgaaacgtatattcttccttttgttatgtttttgtttctcggtgttgtcatttgcccagagaacgaatgaggctaagcagttgaccaaacaggactctttgcgtttgcagcaactattgagcggtcaagtcgaaattgtgatagatgatgaaacacagaaagaaattgacagattgttcaatcctgaaaagtggaaaatgaaatcaactcccttccctaaaaaaaacatgaagtttgaaacggaacttcctcgttattatatctctcaagtggatacaatagatggtagagggtatatcagactattgccgtatggaccgtttgaaactccggaagaggaacaaatttatgtagagattcctatcaacaaagagttgctggcaggctatgattctcgtttggaacctgcgccggcaggcaaatttactcctagtgctttgatggtgggggcgggtatcagtgctacgtttgatgccgataagctgctcggaatcattttcagtaagaaaatgcgtgcaaaagcccgtaatgccaaagaggctgatgcttggaagagttattgaactattgagtaaagaaacgaatgccggatatatgtggaatacaccggaattttgtgaatttcatgttgaaaaaataggagccacgtttggatagtgccagacgtggcttgtgattagatcttgttgaatttgatttattcaactgctgattttattttatattatttatacttacctttttccaaatgaaattgtcaatcatttctttgtcgcatttcccgtttttagctttaatgttcaggttttcgaatgtaaagttagtaagttgatattgatcagacttttctacactgaagaaattatcgcatttaaaatcaatgtttctcattgtcacatggtttgagtaagaaatgggaatgtcttttcgatctttcaggtcaaagaattgcgtccaaggtttgatatacagaaaatgatctgcatctccggtgatatcttctaccagaatatattcatattgttgaggtgtgtccggccgcatctttaaccataacaaacgattggcattggtgatgtgaatgcgtcgcaagataatattgcgattgtggatggattcgcttccacaagtgagggcgccgtggcagaaaccgtatgtacaatcttctatgatgatgttggaatttcctccattattcgggtcttggtctgcccaagggcctttgccgccttttaaagctatggcgtcatcattgacagacatatagcagttctttaccagtacattgctgcatacatcaatatcaatggcatccgtacttggagcctttaccggtctctccggtgagaaaatatagaggttcaatatttttatgtgattacatttataaagatgggtagtccaaaagggagagttaatgaggcgtactcctgagagttggacgttattgctatgggaaatatgaaccagccggggacgtaattcatccatattggtacattggggattgacttttcgacgaagccaaaatgatttccaatatcttaatccgttaccatcaatagttccttttccagataacgtaaagccatccactttgtcggcattgaccaacgccgcgaaatatttcaagctttgcccttccatgcgggtgtctatgatggggaagttgctgatatcatcacttcccttcaacacagctccttcctccagatgcaggtgtgttttgggtttgaagaacagcgctccgcttaaataggttcctttgggaataacgataactccgccaccattttgtgcggcagcatcgatggcagattgtattttctctgtttgtaacagggtactgtcattgatgacgccgtaatctgtcagaatgtattttttacctaatgtgtttatatctactattttactgtccttaaaccaatcggatacaggtgtgccgtccggaaatttttcttgtgccaaagacggaaggcatagaaagacggcacatacaaaagttattaatttcatgattctgctattaaattaatcactattcacttgtttattgtcggaaatcaaacatcaaattaaggtgtagtccttcatcccccgatttgatacggatattacccggctggctgttcggcccttgttgctcaattggtttaaaggagcaaatagccgggatgtccagcaggaaggatatatccccttcagggaatttgggcatggtgtcttttacgcgtcctttcggttcttcgggagtgaacacatggaagaagataccgtcattccgggaataaatggtgaacggtgttgtgtcactttccaaagtggcccaatacatattggcatgatatcctttaaattccggataaaccagattttcaaaactttctccggtaatggtattgttatactctttgtgccatactccataattcgttcccggaatccggtttttccagacacggtatggaccgcggcccatccatttcatgccggagcaattcttttcaggataagagaaagtcagaccgagattgaatactttggagtccatgaaagcatcatcaaatccacctccgccggaagcccggttcagcagaatggcatccatatagagtagtcctttgtccgtaagacgccatacgatggagtcggcggcacctttgtatttggcacagtaaacagccccctcgttgctgttgcggacatagctcaatgttggttcgtagcgcattttcatgcccactgccacaggaccgtctttgaatggaacttctgttcctcctgatgtgatacggctgatcatgccggtagccgggttaaaagtgacggttacacggtcgcttttcagttcgatggtggtagcggtttgagtggcggttgccggctgtaccgtttccagggtcatcggagtctgtgccattttatgatcaaagtattgttttgccagtcggataggataggtccagttacagatacttttcccctctttgtcaaaagcctctaactccagtacatcaccttcccggaaagaagcaggaagagtgaagcgggcttttccagtttcacccggtgtgatggcaggcagttgtacatggccttctgcgataactttaccgctttccattgcatctttcaaaggtgtttcgcaagtacgtattttgtaagtcatgcgacatttgtccaagttagtataagtatattcattagtaaccaggaagctgccgtcaaagtggtcagtaatcagcagcggttttaactggatgggcgaccattgtgcgcggatagcatagtaacttccttctttttctctacgcggacctactaccccgtcaggagcattggatttatctgaatccaatatgcctcctttatcagaacgtttgggagcttcgtcacagaatacccagataaagcctccggcaaacatggggttcgtgcaccaacgatcccaaaagtcacgtagtccggcaccacctccctgatcatacatggcatgcatgaattcggtaggcataaatactttatagccgttggtaaaacgtgccactccggtcagataagtgggataatggtgggtgtccagatcattgaaatcggcccaaggatgtaccatgtggcgtttctgtaatttatcgtatttggcgaataaaggatcaagattataattccatcctccttcgttgccattactccaaataatgatggaaggatgattcacatcgcgttctatcatttctttgactaatttaggacctacttttgaatcgtatccgttttgccatcctgccagttcatccatatagacaattcctaatgaatcacacatatccaggaaatgttcatcaggcggataatgtgaacggactgcattcatattcatctcttttaccagcaaggcatcctgacggctcatagctgcactggtagcacgacctccatctacggaaaaagaatggcggttgacacctttcaccacgagtttggtgccattcagataaactccgtcttgtggaaagaattcaatggtgcggaaacctatccgcgtttcacggctttgcaccgttttcccttcggggtctttcagttccaatctggctacgtacagattggggtcctctgtagaccaaggttggatgttcatccagttcccttccaccaactgttccttgttcgaatccttaatctgatgagaaatgctagatttgttttcttgagtgtatatgtcttttccatcctttaatgaacggacggaaacagacaattcatatcctttggcatctccttccatttctattgccgcttgcaattttccatgctgatcggcgttcagaataaaatgtcgcatgtggactgccgggacaacttccagccatacaggtctgtaaataccaccatacagccaccagtcggctttacgttcggctgcattgatggatttgttggctgattctttagctatctttacttcaagcaggttctttttgccgggcttcaataaatcggtgatatcataactgaagcggtagaatcctccctgatgcatctcgcctgcgggttttccattgatgaaaacttccgtgtcggtcatcactccgtcaaagaatatttttatccgctcaccggaagttgttgccggggattcaaatttatatcgataaatgcccgtttcgtcgcttggcctttcaccttttatagtgtaccaacgaccgtaagtatattctccgaatccttgcagttcccagttgcagggtacttcgatctttttccattttccactgttttgtcctcccgaacaaaagaactcccaagtcctggtgtcgtcaataccggttcccgataaatagatacgttcggggtgcggagcttgtgcctgcacagttggtccactccacagggcagctattactaaagctgtcagtttggtccatttgtttttcataaaataccattgaatactgttttcatgatacaaaaataaggcgggataacccgccttacaatggaaaatcatacattatgatgaaaaatgatacagttatagggaattaatatgccgatagaattattttatttctattctcatgggagattcctttttatattcaaccttttcctgattggcatttatgttcttgaaaataatgtttttggatttcttaccttctacattcaccctaatttcttcactagggagtttgaaatgtatatcctcgaacaggatgtcttttccatccaatatgtgaatgtcattatgcagcgattctatcgtcagcttccgcatcgtaaatccggcggcatcattcagggcgccgattaatttcttgcatttgatctctccattttctatcactacctggttgaaaggtatttcaggaatgccattggcggtaaagaactggtcggctgattctacaatgaaatctttgatcaggatattctttacatcaggtgtcagccggtttacttttcttgccggatagcgtgcggccagttcgcccatataataagcactgcccaacaaatcccaagtaaaggcttttcctacattgatcatgcgcagtctctcataataagtgttgtcactgcctcctccacggttgcgtcgcgttttgaaacggatgccggtacgagtgccgtcaaatacacaatcgtgtacatacagattcttgatcactccggctgtttcactaccacaagtaatcccgccatgtccatgctgggccagcgagtagcggataactacattttctgtaggtttgcctacacgtaatccgtcttctgctctaccggctttcagggtaaagcaatcatcaccgcagttcagcgtgcagtattcaattaatacatttttacaagattctatatcaatgccgtctccgctgggcaccttggtggaattaacggtaatgcctcttataattacattctcgcaataaatgggtaccacattccataaggtgcttcgttccatcgtgatcccttctattaatacattggtacagttgataggagagattgttttaggacgatagaaagtcctgccttccataccgtcatagatacgttgttctataggcatgtcccacgggacatctttttctaccactgaagcaccgttaggacgttttctgatttcagcatccatagatggtccgtaaatggttccttctcctgtaatggcgatgttgttttccccattggcgtaaataaaggcggccggccccattatttctaccccttcatggcgtgtgaaaaccgccggtagataatcttccgcacgaccggaaaactctatttcggctcctttggctaaatgtagattaacattacttttcagtacaatacgggccgatttccattttccctcaggaatgacgactgttcctcctccttgtttgctgacttcagcaatcgtccggttcactaaatctgtaataggggcatcttctgtcattcctttgtctttcatattgacgatgaaatcgggaaaaacgggacgcttcggctgaggcatattgaaatatgcattcttgatcggaacgatattccggggcattgcttgtgcaccgacttcatttaaataggggatagctggtttcagttctgctgtcagcttatccaatacttccggatttaattttacttttaccattccgatggggtggaagcgcgtatcatcccaagctgtataaacaatggtatatacattatctccttcgggtatcaggcaaagcggagtcctcatgacagtccaccattttttaactttggtatctatggcgatataacgtgctttgctccagttttttccgtctatggataaagtgtatcccattctgttgggtaagtttaaatagttcggcccgccgtcaaacatcgctatgtaggttccgttgggtaatttggatacgataggattctctacaaactgcgggtgaatggaagttatcggattgatttcctcacccatacgtttccatggtccttccaacgtttctgattcggccagtcccacagcccataccttgcgcttttcccctcctttcaagggataatctgcacgggtttcgtaaggataagctccactgataaacgcattccagcctttatccactttatatgggaagaaagaagcgaccccttgccgtccttcccaaagttgggagtccagtcccggttctataatgattcccatatctcggtaaggaccgcctattccttctagaccttccttttcggattcacatctccagatgcggccgaaagaatgattgggtgcaatttctttatctgtggtgtaggccagataaaatccgtaccatcggttgttttcctcgctgaatacaggcatataagaccagatggcggaacggcggtcattcatgggattgtcttcatgtaccaatgcatagacaccgcttgattccaatatagtggattggcgtgtccagtgaacaccatcagtgctggtccagtgtcctatacgtgtctttactctgtcgtgataggcaggcatccctttcacaccggcgcgttcggtaggaaacatgtgataagtaccttttatttttacgatagagcctccttcaaatcctccttgaatcccttctgtacctggcattcctgcgttgataacgggggcttcaggtcctccgataacagtaaataaagtttctccttcggtgattccatcgatatggaatgatatactatctgttttatcagtcgttttgatacttttgctttccatcttttgagcgatggcttgcgtacccgccagacataatccgatacacagtccccaaaaagcgtttcttgtcatacttagtcttttaaaagttaaatggcctccattttacggcttataagtaatgacgtttgtagataggatttgtaaccatcggatttgttcttatttttatgaagcagatcgatgttttcttgtttgtctgtaaatagaagaaaaaggttatttttataggtgttaaatcaaaatatgatgtatatttgaaagcgaaataatcaaatacctatgaagaagtatattataactctgctgttttgtacgttattttgtcatttaggcattgctcaaggtttgaaatcagtttctatcttgggagattcttattccactttcgaaggatatgttcaacccgatactaattttgtatggtatctgaagacacctcctgaagggagaaagacggatatggtttctgtacgtaatacttggtggcatcagtttattaaggagaacaactaccgtctttgtgtgaataattcgttttccggtgctactatttgccatatcggttatcgttcggaggattatagcgaccgttcttttatcacccggatgaaggcgttgggctgtcctgatattatttttatttttggcgcgactaatgattattgggcgaaatcacctttaggagagtatcagtatgcggattggtccaaaaaagatttatattctttccgccctgctatggcttatatgctggatacaatgattgattattatcctaatgtggagatttattttctattgaatgatggtttgggagaggaaatcagtgaatcggtcagaacgatttgcaaacattatcagatagattgcattgaactgaaagggcttgataaaatgagcggacatccttcggtgaaagggatgaagcagattagtgagcaggtgaaggcgtatatgaattcccggcataattgagtatgacggtttatgtagtgattattttagaggaataatgataaacagtttccgatgatattttagtgaaagatatactggttgaagtatattctctcactaaaatatgcctatcacttcttattttacaaaaaacaatcgtcaaatgtctttcagttataatctaatctcggtggttagagcaggtaaaccagaaagttttttcattgtgatttcattaaagtttcttttttagcctttaaaaatgaagagagcttatttatttcgcttctatactttcgttcgttgaccctgttcttattttcttctggatctatgtgatggtcaaacaacattcgggaatgaatcttttctttttgtttccattccgcatagttgtatctattgctaacagcattgtctcccccttcccattggatatatacttggtcttttatttttgcttttaaatttgttaaaataggaacaaaactagtgccatttaattgattctttggtatgggcaaatgacaaagttcacatagtgttggatataaatctacgaattctaccatggacttagtttttccttttttcaatccgggaacacgtacaattaaaggaacgtgagtagaacgatccattaaattatgcttaccgagaaagttgtgttcccctagatgccagccatggtctcctagtaatacaacgatggtattatttgctaaacctagctcatccagggcatccagcacttttcctatttgggcgtcaacatagcttaaacaggcataatatccgtgtttggcttctttctgaaaatagatatcatctgctgtggtagtacgtgcgtaagcatagatttctccagagtttttaacttcatccggcaagcctgcagggcgaaaacgattattggcaactggaattttctctcggtcatataaatcccaatattttttaggggcattaaaaggtaaatgtggcttccaaaatccacatgccataaagaaaggttttccttgttcttttaaacgttttaagtctgcaatggcttttaatgccagttttccgtcatcataagcggtgtcaggtacttcagcccactcacaaaaaggtcctcgcattgttttgggattgatagttcgtgcggaggcttcattcatccataattcccatttattgtattctgcccaatatacatcatatccgtcgggatgtttacggtaaggaggttcactccatgaattagcatgatctgaaagatggtggaaaaccttgccgtttgagattgtgtaatagccatgtgatgtaaaccatcttgatatcggaattgcggttgggcaatctttgctggcataagcggaatagttgacaaagcgatctggatagtgtggatacactcctgtcaataaactggcgcgtgaagctccacttactgggatattacagtaagcgttctgaaataataacccgctggcggcaaaacgatcgatattgggagtctttacttcttttactccatagcatcctaactcagggcgcatatcgtctgccatcaagaatagaacgttcattttctctgtctgtgaaaatacagacagagaagagaaggcaagcattgaaatgcttgaaaacaaagtatattttaactgcataattttatttattgttttcccatccaggattttgttctagagcaggattgagtgccaattgatttagaggaattggatttagatagtaatgttccaaccatcctaggggtttctcaaaataatatacatatccttcattgttggagggaccattcataacttttacattaaattcacttgcattttttaaatagaccccagtaggttgtttgtctacgtaatgtccttttttccagcggcgtaaatcgtccaaacgagttccttcacccattaattcaacgcggcgttcacggcggatttcccatagtaacggatttacatcttgatctctgtcaggatcaaaatctgtggtaatatctgtcaagaccatatcggccacgtgagcacgttttctcagtttattaatagtttcatctgctatagattgatcgaattgccctagttcatacattgcttcggcataattcaacagtatctcaccgagtctgaataggggagcgtctgtagtacaaactccattggcagtgctggcatcggtatgagtattatagtatttccatacccagaaacccatttggctggcattccatccctgtccccaattgacatttttgaaatgaggttgccctttggttataaaacctttgaaattagatgtcggcaaccggtgataagtttctttagaaattgttgccatcaagtcaatatattcacgttcagagggattgtctgtgaacttccattgagtggtagaggcacttgctagacttaccatatagggaggacatactgtgtgatataaacgataatcccggttgcggaactgtgcatatacgtctttatcacctccgtatgtggaactgtttttgataggatgtccgtcactgcacaaataactgtctacagcatctttggttgcttctatttgtgattcgccggttcttaccatacgtgtgagcccatggcatagctggctggtagcatactctttgtatagaataattccatttatgccatctaaagactctgagttgaaaagttcttcatagttgggatgtagggtagtatatttattcatgacttccttggaagcccgtgtacattcttctaaataggttgtggcattttgtagggcatgatattttctccatgtaccttcaaataaacaaaaacgggaaattaatgattgtactacagctcgattgatcgtattattgccatctccgtctaccttgatatgttcttctgcatatttcaagttattcagaatattttgggctacaacatcccgtgggtctctaggggaatatagttcctcgctgtcttctgataaagcatgttctacccatggtaaatctccatatagagatagcattttaaaatatttataagcgcgaaaaaaatatccaacacttctccaatgtgctttttctgcatcattcatggatgactggtctatattgtccaacattaaattcacccggcggatatattcatagtcccatgaatcagaagacgcaggtaccttagctttctgatacgcccattgactttcattgcctgagacatgcttgatcatattgtcagcttcataatctcctttaaaaatctcatcagtttgtcctgttttatatgcatagccgaaaaagacgttatacagtccccaagcgtaagtcttgaagttttcatatgatcggaaagaggttaattccgtttgttgatctttgggatatacctccataaaatcattatttaaacaagaattcatcaacaggaagagtcctactcctactatatattttttcataatgtcagcttttattataaacttaaattaataccaaatgagaattgacgcatataaggataagtaaatccacgttgtcccaaattgtctgttactacacgttcagcatctatccctttgggcagatgatcaaatgtaaagaggttttctccactaaaaaatactgataagttagtaatacccagtggcttgatcagttttatggggaaggtatatgataaactgatattgcgtatgctcaaatacgctccattttgcaaaaaacgggtttgtgttttttgattggctttagtatttccttctgccttttcatataaacgtggaaaataactatttgtatgttctggagtccagtaattcaattgagagtcaaacaaagttgagtaagcatcgtaatgtggatagaatagctcattcataagccaaagatcccgtttgccgactccttgtaaaataaatgacaatgaaatacctttccatgctgcgccaccacgaattccgtactgatatctgcgagtatcattaccgataatatgagtatcgcctggttcgtttgacgtgtttttaccattgtttataataccatttccatcaaaatccacataaagtatatctcccggattgggattataaccttccattttgggaatattgttttttaactttccttgactgtcaaaatcttcggtagtatataagcggtctgtagtatacccccatatttcacctaattccattccttttcggtaaatcagattgccatccgaatcttttcctagtaagcctacctcattgtcgtattttgtgattttcgtacgcgagtcatataggttaaaacctaaataatattgcacattgccgatacggtcattccaatccaaggatatttcccaacctttggcgcgtaaatcggcagagttttgtaatggggctttggcacccaatactcctggaagttccatacctggagccaacattccttttgtatctcgttggtaccaatcaaatacaacatttaggcggttattaaacagccctaggtcaaacccgaaatccaaagtactaactttttcccaagtgaaactattgctgactagagctggaggggccaatgttgtagtagcttgtccgtttacaacccaattagccaatggagaatccatgccaggaataaaagcataaggttctatactttgattaccgatattaccataagaacctctcaattttaagttagaaagaaaaactttactccattccataaattgctcttcactgacacgccagcctacggaaacagaaggaaagaagccgaaacgattttctttagggaatttcgaagaaccatcataacgtccgtttgtttcgagtaaatatttaccggcataagagtaatttatcctatagaatactcctctgacatggtattcctcaaattcatcactgtttttataatctcctgtagcttgtgataatgagggtaaatcttcgttaatcatatctgtgcgtgacgctttcatcatcttataggcattgctttcctgattgaaaccagccataattccaatgtcatgtttacctaatgttttgttgtaattggcatatacattaaaagcattataattggtcgcccgattttctatttcatatttcgaatttgaaacagactgttccttgcggaagttagctccgtgagcataattaaatttcttatcgaaagttgtgatttctctagtctttctattaaatgtatattcaccgattattttcagatctttgaacggagtaatagtcagcttgccaaagatgcgtaagtcgtttctgtcattttctttaggtgctgacagattaatgaaattatgaggagtattgataggcaagatttcaccgtctagttccatattacctaatggaaaataagatggaaaggctactgctgctccccaaataccataagaagctgaagtatagggaagttctgaatgtgaattcgcatatttgatgtctaattccggagtaatccaggaatgaatatcggaacggatgtaagatgatatattataacgtttgtatgagtctttatctgtaacaagaattccgttttgatccaccatcccagctgacattctgtaagatattgatttattacctcctccaacagaaatattatgtgtttgttgaaaacctgtttccatcatatcgtttaagagatccgtttcttgtaaactgtatcgaagtccgtctactacggcataaccgtcaggataattgcctgaattagtatcatattctttcaataactccaaccaggtatctacattttgtcctgtttgatatgatactgttcccatatctttataagcttgtactgtttgtaacggagttgctttgtggggtaaattactaggcttactgaatgagaagttattagagtagttgatagagaagcgagtgtctttcattccctttttagtggtgactaggataactccgaatgcagcgcgtgcaccgtaaatagccgatgatgcggcatctttcaatacagagatagattcaatatcattaggatccagcatatttatgtccatctctacattgtcaactaatacgagcggggcaccttcattgatgctgtttactccccggatattgaaagacatttcagcaccgggttggcctgatgtacctgttacttgcaatcccggcattgctcccatcagtacattacttaccgaagtaacaggccgatcccccaatatttcatccatttttacactgcttactgctcctgtcaggttggcctttttttgtacaccgtatccgaccactactacttcttctaaagtttcagtatcttcttttaaaacaatatttagttcttttttatttccggtgttcatttccagtgaggcatatccaatgtaggaaatttgcaatgtcgcatcggttgaggcatctagtacaaaccgtccgtctatatctgtaatcgtgcctatagattgtcctttaatttttacgttagcacctataatcggttcgccattcacatctttaatgatgccggatattttttttgtttcagatgattttacattgccggtttgcttgtccgaaataacgattgttttaggtgaaacaatactatattctagatttctgtcttttaaagcttgattcagaacggtagtgaccgaaatattttccgctgatatcgaaatatttcggtcagcatctagaacaacactacgataagaaaaacgatagggcgtttgattctcgataatgttaaagatctcttttaatgatacattttttacgtttatcgttattagtttttcctgtgccatagattcgaatgtacagaaaagaagcaataacgaaaacaaagtgaacaacttcagttgtgcgtgtttgtttttcatacgatagtaaattttagattaatgttaggccctgtgggcattgtcgtaagtaaagacaatgtatttttatagaagtaccgaagataagatatgttataaagcatacaaaacgaagccgctttctctcaatttagaaagaaagtcggttttgatattgattggatttgattcaaatgtcagtcaaaataatttctttgcctttgatttgcgccttaagatgataggacttttcaattacttccagcacttcgtttaaattggtaagaggtagtgtaccggtaaaagtgtcggtgggacagtttttacaggtgatgttgattcgaacattatagctttgttcaatagtatggatgacttcagagaatttagtatttctgaatatcatgttgccatgtctccatgctgatatttttggggtgtcctcttctgcaatgatgaaaatattacctgttgattggtctaatattgccttttgtttcgggtgaaggattacattcttatgactttgagttgcaccaagccatacgcttccttcctctagggccagttcggctgttttatgatcctttcgtactaaaagattaaaagtagttcccagtacctttacttgtagtccttgggcatctatgataaaaggtacttccttgtttttatcgatctgaaaataaccttctccatcaaagctgattttcctttcttttttgttataggtttgggggaagtatgctaacctggattctgaattcagagaaacagcggtgccgtccggaagagtgacacttgcccgttctcctcgagctgtacagacaatcatttctttggtggcaatttgtctgttctcataatacagatagccggaaagtataatgaatacaggcaataatatagtagcggcaatctggattatacgactaaaatcgaagccattgcttttttcttcttttatggaattttcgatctgtgcctttattttgtctatttgtttgtcgggaacggaagtgacatcaattttttcattcatccaagtttgatacatttcttcccctatttcatagtccgacatggatttaattctatttctgagttcctgtaactccgccggggatagttcgtcattcctatatttggtttcaagtttcttcatttatttttttctatttatgacatccatttatgttgatagtaccgaattttattttctaattaataaaaagtaacattagaagtaaccatattttgtttaatttctcctttagggtcttaagtcctagtgaaagctggttttttacggtttgttcgcttaaagaaagtttttctgctatttctttattggataactgtttgaatcgggatagacgaattactttttgctgagtgtctgggagcttttctattgttttgaggaatctgaataggaattcattatattccagcttgtaatgagtgtcctcggttgacagggtatctatatgataaatgtattcttcatatatgggatggtttattttctgacggtatgcattgatgagacggtgtttagccataataaaaagtagagaacgtaatgtttcatcttgtcttatatttatacggttagaccacagttttacaaaaacctcttgtacgatttcctctgattcttcggaagatttggtaaattgtaaactataagcatacaggcgtttggagtacatttgataaattttgtcaaatgccttatgcgatccttgttttaagtcatgaatcaagtgtcgttctatattttctatgtgctcttccaagatatatggtgttacctaaatgtggattaatcccataatattcgtttgcaaagataatcattatgtatttctcttgtgtatctctagaactaattttgtatgatatctgaatatgtcttttaattgtaagaaataggttcaatagtaattttttcttgttttaagactaattctcttccttatattcaaaccattggtatgatgctttatttatcgattgttttccattacttgtcgcatatattccgactcccgtaccattaaagcggttgaccttattatccgacacagcatctacactttgtacctctcccacttgataaagcatatcatttgacaaaccggcatagaatgttaatgtagctcctttggctaccaagcgtaatatgacagatttttccttccaaggcagtgtcgcaattattgtttttttgcctagaagtacttttgtcaaacggatttcattctttcctttcagtaatgaataatagcctttagctgtacgatacagaaccaagcccgcccattcgttcacccgacgggtggagaaactcattgtcgtggtggcagaaaaattatgggaatgtacacggcgcagaagcatggagggacataccagactgtctgccatctcaggtcggagagacaaaaacaagttgccatcggcaaaatgatggaaaggttgctcagggatacgcattgtagcccattccggtgataaagcagaactttcaaaatcattctgtttatctgtcttcgacaccggcgtccatggtaaaggtggacgtttcaaccggtttccgataacaccaatgccgggattgaagataggttcaccgttttgaaaactcacctcacaaagaaaggtttcgcgtcctaaaggcaccagtcctccttccacaattcgtttaccgagaaacacagcataccaatctccggtcggtgtctgtaccagatcggcatgtccgagagactgcacagggtagtccttgccaagatggcggtgtgtcaatacgggattgacggtacaaggtacatacggtccccagagggatttagcagtgagggcggtaacagcatggttataatccgatcctccttcagccatcaacaatagatagtggtcctttattttgtataaatgaggcccttcggtgtattttgcattagccgcatggccataggccaatgtttttcgttctccgaccagacatcttttttggaggtccagctcctgcatccatacggcacactgggcaggccatgcgctcttaaaatcccagcgattgcctgtataataacagcgtccgtcctcatcaaaaaaaagagaagggtcaatgccgggagcatctttcagccacaccggatccgaccagggaccggccggattcttggctgtcatgtagaaattgccaccacagccatgagctgtggtgataagatagaatgttccattatgataacgcaaagtgggggcccagatgccgtcattatccgtcataccgttaaagtcgatagccttgggattggttaatgcatgaccgataagcgaccagttagtcaggtcacggctgtgataaataggaagtccgggaaaccatgtgaatgatgaagtgactaaataataatcttctcctacccggcagatggaaggatctggatggaatcccgtgcgaatgggattggaaatggaatccggaataatcgtttctcccatcattcttgcacacaaaaaaatagtaactaacagtaaaagtaatctttttatttttctgtttagaaatatgaaactgcgcgttattataatatttctcatcgttatttaatatattagcaattattatacttcaaattttccagtgttacatttcttctgtcttttgcatggttaattctgtatctcagcccttttgcataagatatggaatagctcaaaagtgatagacattgtctatcgttacgaaagtgtcgtcacttccatagattgttttagtcttgtctgtccataccggtcgtattcctgttacttcaacctgtaaggtataatttgccttcgacattttcggtgttataattcgaattgctttttccggatacttgctgtagaaatctaccaatgaagaatatacagtatctttctcggcatttaatacacttactttggcatatccgccatgagggtttgtttctccaacaatagcggcatgagttcctttgaacgctatctccaacacgtctcctttttgattggacttccatgccccgtacaactttttccctttgttcagagcgtctgccggttttagcttcctgatgtcccatgcctgccaatattcagggatggatatttttgttccatccacttgtaaaggcatccatacatatgtggcggctgaggcctgatgcggataagaccaacgatcccccataaacataggtatggtatcgttaccgcatttcaacgggaatacaaatgtactttgcgaattgtaggtcagcttgccttccgggcagaacagtccttgtttcgtccaaggaccttctatctggggagccgtaaaatagaagttgtcatttttctcccaactggtcaggtttgaggtaagcataaaatagacaccattctttttgaacatggccggtgattcgcccatgcctttaatgtgggccacttcagcctctatcgaacggtaatcatcgcttaaccgataaatagggccatgatgaatcagtaaatatccttttccatcggtgtcctgaaaggttcccatatcccagcgttttacaggttgtcccttatagagcaacggtccctgcaactgatagtcacctgcaatcgttttgcaggtggctaaaccgatataagggtccttgtatcccatatcatcggcatgcatcagcatgatatactcgcccgtcttagggcatttcatcacttttacacgctcacctacgcgattgggaccgaggatgccttcgggttggactctaaggacaatgttctcgaatttccagtttacaagatcatccgaagaataacatgagaagccggggaaagcgttacttttgtccgatttccattctccgaaaagataatatcttccattttcttccacaatacaagcgccatgtgcattgacaatatttcccttgtcatcaaaccatggaataccgttgactactaaattgttttgagctgtagctgctcctgctttcaataagaggaacaacaagaatagtaaatatttcatcatgttcttattgtatattcatattttatttattcaataatgcactaatgttctatcttgaacattaatataaaaattataggttggaatctttacgctatctatttttattattatgcaaagatcgtaatatcaaaatagagaacaaatggattttgatttcaattcctgtgtttttgtacaaaaaaccatatcttcaatctgtttgtttataagtgataaatagaaaaagagatattcataatttttttgaggatcattgtgtttttggaaaaacaaatagttggtcaagaatgactcctttatctattgcttttacttgaagacaatgtttctcattttgggaaagtgggagggtgaaatgtaagattgctttgtttcttaatacattttctttccatatttcacttcgcccatatgtttcgtaattacttgcaggaatctgctgcccgtcaagtgaaagcgcaatgcgaattgactttccttcaataggatgacaaggaagtaaatgtacttcaatctctacagaatcagtatttattgcgtcaaatgtatagtttacactcttatttttcgggatggttatggctttttcttcataaccgaggccttcacagggggagtaatccccatttgtgcagtctgctccattccatttggcaatgtacttgcgttcttttattataggagaagtcgcagctttatgatctacaggttcaaatactggtaaacgcctaggttgaaaatccatcattctatgccatttactattattatggaaacctatattatagatacgtgttagtgaagcaatactatcaaatgctgcatcactttttgaccatgattccagcccgtggcgagctttttgagcataaagtatttttttattcatttccgctgatgcctgcaaagggtatttgactaattggaaataggcgtcttgacgttccggaataactttattaaagcaagtttctacctcatcttccaatttttgataggccgctaaacgtgtgtcaatatatttttcgctccatggcatatcttttataatacgataatcgttggtgtgatactcttcttcacgagtatttcccatgaattccggcttgcggatatatgctaatcgataatgttctttcatcagaggtaaaagacgtttgcccaactggttaccgaattctctttgtaggaaatggctgagatgctttgtgataccctgttttctgacggagtgaatgtcccaagccatatccatgaataattctatctgatattcagcaggcttgatgtcacctacattcaatacccataatttttgtatgccactatcataggcggtcgtcatttgttgatagagtagtgcgggtgagaaagtacccaaccatagataatcatgtgggcgtccccaataagatatgtggtaatacacaccgtttcctcctttccgctgacgttcttcatccgtaggaaaatgatgaatatatccatagttgtcatcgcaccacatcaagcatacatcttcaggaacttcaagtcctgcgtcatatatatccataacttctttataaggaataaagacttgtggaacttttgttacgtcttggttaacatattgttgtagtaaatgacgttggtcagcaaatacatgttgcaacacggctttctgttcctttatcgtttttgcaccattcatagctccgtcgtgtactccacgcatacctatagtataaagtatgggttggtttgccacttcctttactctttgttcccaaaattcataaacatttttgctgttgttcacataatcgtattctccttttcctcgttttctccattcaccggctgtgcttgaagccattggttcgcagtgtgaacctccaatgtagataccgtattgttcagctacttcacgatttccttgtgttaagaaaaaaggttgcgtacattcatgcatggcaggccaataggtatttgcacgtaagcgtaacattaattcgaaaatgcgcgcattggtcttgggaccaatacgaccgggtttgtgccaaggttcgtagtgtaggcttgaccatggcattaatccccaatcttcatcattgataaagataccgcgaaattctacggaaggagcttgcagatttacgtagccgtttgcaagcgaaaaggatgatcgttttagaggcataacatcagcccaccattcccaaggtgacacgcctatcagccgggaaatttccagtattccatatgcgacgccatgtgcatcacttcccgttacataaagttggtcatccgaaactttaagttggaaagcttctttacgtttatctaacagggtggtgtctttattaataataatattaccttcttttcctatacagacatccgatgacaatactgcttggaaatcatttactagcattttaagtgctgattttactaccggttccatttctgttgtatcacaagctatatgaattgtgtgcccacttttcagttcaaaaccgttggcctttactactatcattaataataatagatgtatgattgtatgtcgcatattctgttttaaattattaattttccaacaacaactttccttgattggtctttttctgatacttaaaaagggcatatcaaaaatattgtatgctctgaaattttatcaatatgttttgatatgccttttgtgtataaatttatttattaataatcctatcaatagcctgcattttgctctattccttccgaatcttgatcaataacagtttgtggaattggtcttaataaaatatggttatccattttgtttgttttctttgctagattattatgttttaatgtacgttcaataagtgtattggtacgttttaaatcaggccaacgcttgtattcaccagctagttcacgtgcacgttcatccagaatcgtatttatatcaatatctacttcatttatgatcatatctttttcgtgaccggggatggcagctcttttgcgtacagcgttaaggcgttcggcagcttttgatttatcacctgcctgcaaataggcttctgaagcaatcaaatacgtttctgctagccggaataggaagatgtcccgtgtgcctgaataggattgattgttggatggccaaggagctgttgaatcaaaaaacttccatatcatggggaaaattccgctaccacctatattttcaatatcctgtttccaaagttctttggttatgatgatagcattgggatgttcagccatgatggctaaagaatcgttcactgtaaattctttgtcataatgtggaaaatagactcttaaatcgccagcttttacttttccatcatcttttgttgcataatattcacttaaaaaagtaacatcatagcgtgagtcagagtctgtattgtagagtgaatagagaaattgtgtgggcgtaaattgcggtttatgccagttataggttgtattgtatatttcgaaaccactaggaattttgctccatagttcccatccgaacatcgcattctgaccgcttccattattaatatctccacctaaagatttggcatcatattgaactgaaaagataatttcgtcatttatttcattaccttctttgaatacttcctggaaggaagggagaagacgatattctccactattgattacttcgtccgctagtgatgcagctttagtgaaatcatcggaatcagcatagcttttataacctcgagttaaataaaccaggcttaataagtttttgcatgctccttgagtggcacggccaaactcagcagctttaatcggaagcttactgactactacacttagctcattgatgatgtatttatatatatcagcctcgggaatgcggtcaaagtgtgtaatggctgatgtaatttcatcctcaaccaaaggtacgtcaccgaactgttcaactaaaagaaaataataataagcacgaaggaatcttacttcggcatttgattgaactatttctgtttctgaaattccgtttactgcgtttgctcgggctagagctgtattacatgcttgtatggaataatataagtctgcataatggtcttttacacaagggttttcggcatccaattctgcatattcgttcagttggcggctttgggtgtctcgtcctccgtaactacctccaattaattcactttcaccgcgagtaaatatatctgtacctagacaatacaaccaaggctcgtctccccaaactgttcttaaagtagaataagcagcgtttactaaagaacggtatccgtcagctgttacgaaataattttctgcagttatattgctctggttcttttcttctagaaagttgtcacaagatacagttatagaagcgatgaatagtagagcagataattttatttttgttttcatattgttgtttttttagaatgcaagttttacaccaaataaaaaagttcttgtacttgtagcttctccccacgtattttgagttgcccattctggatcaaatcctttgaaagaagtgaaaaggaatggattgttggctgtagcatataatttcagccttttaattcctataggtttcagcagcgacatggggaaagtatatcctagtgtgatatatcctactcttacgaaagatacatcttgatagcacatggaagaaaaatattttcctttatttcctggttgagggtatttatttgtcggattggtttcagtccaataatcaactttagcttggttgtaattaccatcatatgccataaacgaagaaacaaatgtactgtttaactgggcaccttgacgggtatatacattgaaagccaaatcccagtttttataagtaaatgtattggtgatacttcctgtccatttgggtagctgttgccctagaatcactttatcttttgcatcaatgacattatcatgattttgatctttcacctttacttgtcccggtgtctggccatatatggctgctttatcggcttcggatgtctgccatattccatcaaattcatagtcataatttacattgatagcctctccaataaaccatttgttaccgatatcatcttttttccctccgtacaattcaaggatttcatttttattggtatcaaaaattatatttgtctgccaggaaaaatcacttgtttggacatttattgtatttatagataactcaagccctgtatttctcacctttccaatattgtcccaaacagaagtccatcctgtggtgctaggtaactggcgttccataatcagatctttagaggtgcgttgatatacgtccaatgaaccattaatacggtttctgaagaaaccaaaatctaaaccgatgttgaattcctgtgtccgttcccaagttaatttactattagcaagaccgtttttataataagaagttgaaacatcacctccaaaatcgtaattcctatttgacacattagactgtgtcccataaatactaacagcatcgttgcccgtaacaccatagctaagacgcaactttaaactactgatgaaatccactttctttataaattcctcttcacccaacatccatgcaaatgcggctgaggggaaaaatgcccatttattaccatcggccaatctggatgagccgtcataacgtcccgaaacagtgaaaagatatttatccataaatgaatattgaatacgacctaaaaatgaggcaagactagtctgctgatagtctgtttgtgatgcttgaatatcggttgatgcaactgcgtccaagttataccacttactattataaggtaagtttcttgctttttgataagaggattcccattgttggtattgaatgctttggacaaggtttacattcagactatgttttccgaaacgtttgtcataagtcgcttgattgtcccatacatatccccaatggttgttggtttcatatacggcacttgtattgtcggtttttccagctcctccattcttgcaccacataccataatattctccattgcgtttgttcaacatttgtggcgagaattgagtgcggaagttcaatcctttgatgggttcgaatttcaggtagatattaccgaaagcgcggaatcgttttttttcacgccattcaccatcttctgtactttcataaaggggattagttacggcatcattacggaatacgcgaaataacatgtttccttcgtcatcgtatggagccgctacggaaggtaaccggaaggcggaacgcaatgtttcataactcccttcattttgaatgctgtaagtgaaatacaaacttcctcctgcttcccatttatctgtaaatttccggttgatattcagatgcatattatatcgatcataatcctgcccttcaattgttccgttttcttttaattgtcccaaaccgatagagaaagttcctttatcatcgccgcctgaagctgtaatggtattgctggtttggaagcctttacgtaatactaaatcaacccagtctgtataaataccatgatctattctgttccattcttccggagtaaagaattcagcattgctacgatccgtgctccggcctaactgatggtataaatcggtacgaaattttacgtattcatctccttccatcatctcaggtaaatgactggcttctttaaaacctacatttccttcatactgaatggatactttgcctttttctcctctcttggttgttacaattactacaccattagcgccacgggaaccatatatagccgtagctgaagcatctttcaatacatctatagtttcaatatcactggggtttaagtcgttcattccttcagaagtaggaataccatcaatgacatataaaggaccactatttttattcttaatggaactgacacctctgatctgaatactataactccctcccggacgtccggcattcttctggatgtttacaccagctattctaccctgtaaagcatcggctgcggatggagtagatccagcagtgaggacggaagtattgacggagctgacagatcctgtaatgtctctttttttcatcgtaccatagcctactaccaccacttcgtcaagagtttctgtatcttctttcaatattatattaagttctttctttccggaaactttcacttcttgagaaacatacccgatataagtaatctgtaaaatggcatcttttggagtatccagaacgaaccgcccgtctatatctgtgattgtacctgttgactggccttttacgatgacattggcaccgattatcggttcgccattcgcatcttttacaatacctgtcaccttaatttgtccttgctgtattccttgcacaatctcagtagaaagaataattttcttttcaagcactgaatacttcacattcgtccctgcgaaaatctggtctagtatcttgaatatattattgttgtttgccgaaactgatacaatacgtttcagatctacgtgtttattgttgaagaagaaatcaaaccccgattcttttttcagcttttccaacacagtgccaactgtttcattacgtacttcaagactgatcatggtcttttgcgcatacgactctgccgcataagtcatacttaacgaacagattaaaaagagtacacttagtttcataggtaatggagctttatttaagattaacctacacgactttatcatccaaaataattggacgctaaaataatttttcataattttgtaattgagataaagttaataaaatgttgtctttgcttgtcgccaaacaagcatagaaagatgatttttcatacggggtgatacgccaatatcctcccgtatgttttttgtttagggagcctgttgtctgttcatttttctagtatttaaattaagggttaaacgtatattagtacacttctattttcagcttttccgtctttatatctgcactgtcaatgtaccgccatcgtatacgggaagaaatccggaaatatttcataatacgctccaggcgctgatgggtgaatgttcctgtgaacgaacagccttttagttctttgttggataatacgaattccacattgaaccgcttgccaagcatgtgcagcacttcatccagcggagtgtcattaaagatgagcttaccgtctttccatgaaatctccgattcgcccgaagtgacgtagcacttgatatccccggtttgtggggaataaactaacttctgtctgggggagagcatactcttttgaaattttcctttgctattcttataaataaaccctacgctgcctttgataagcgtggtggaaatgggagtttcattaccgtatgcttccacattgaaacttgttccgtacacctccacctgagaatgatgaggggtggagacgatgaatcgtttccggggatgatgggtcacatcgaaataagcttcaccgtttaactccacttggcgtacatcgccggcgaaaaaggtgggatagcggagggaggattccgaattgaggtgaactaccgtgctgtccggtaacaggacggaggtagtcatgcctgcattggtttttatttccaccatctgagcggtgactaccggctgccgtctgtccggatacagagccaatacacctatcaggaggggaacggacaggatggccgcaatgcgttgtgtccatccccacctggacaggtttctaacttttgttttgctttttaccttatctaacgctttttccgtatctattttctttgtgatatgctgtgtgtctacagccagatagagcgtattcagctgcctggctatatgtaaatgttcctcgtcggcattcagccatgcttctatctgttcattttccggaggagtggttttcccttcgaaatatttagttaacaaagtttctatatcggtatggttttccataaattatgctttaatttcttcctttatattattaagacaagcgagaatgaaaggtatctaaacgaaaaatgcttttttttcaaaaaaaagttttttccgataaaaaccgctatctttgtgcgcaaggaaaacagttattatactatgaatcataccgtcgaagacttgtctttgcttaatgctctccgacagggggatggtaatgcttttgaccatttattcagaagatactatcctatgctgtgtgcctatgcccaccggttggtatcgttggaagatgccgaagagattgttcaggaggtaatgttatggctatgggagaatcgtggggatttgataatcgagtcttcattgaatcagtatttgttcaaaatgacctatcggagggtcttgaaccacttgacgcgggaacaggtgaaaaccaaggctgaagctgccttttatgagaggacacaggcggcattgtgtgaagtggactatgctcgttttgaggaattggaccggaaaataaaggaggcgatggctgctctgcccgacagttatcggaaggcctttgtgatgcatcgctttaaggaactgagttataaagaaattgccgaagtgctggatgtgtcaccacagacggtggcttaccgcatccagcaggcattgaagctgcttcgtgtttccttaaaggattatttgcccatgctggtatggctggtgggctgaaaagtacctctcccgaagttttcccagttttttccttcaaatccttcagcctcttcgcaaacgctcgtcaataaagaaaagcggctggaggatttcctcccggaattccttcagcctagtgtagaagtttcagctctttatggtttgagcttcgtttgtagaagttttctattatattgtttcgttgtatatttactttattgtcaggtccgtgtcgtttgttgccgatacgttttccgtttcgttcttcggttcgggcagtttctcttttccgtagaatcccggcatcggttcatagatggggttacgtggaatggagatattgcgcagttttttgtctttcgccagttgggcgatataacgtcctgcggtggcgcgtgtcagtccgcataacgattcaaacttccggcgtgtcaacacgctgtttgtcaggaagtattccgtcaatgcctcgtctatactctcttttgtcaccggcatggagtgcggcttgtatttcgaacgctcggtcttaacgtcgctcaactgatgcttcaggtatttgtccgcacggaatgtcaccgatttgaatttcaccttgttggcacgtgtggagcttggtgtccgtgtctcggggcaggtaagcgatatatggaaataccctatcccttcgatgtgcacccgggcgccgtctttcaagtaataggccagtttctcgctgagcgagatgatggttgccttgatgtccgccacggtgagcgaggagccgtactgtatttcccgtgccagatagtcggtgttgatgcgctgccagtttactacacgggcgtgatagcgcttcttgcgcgtacctatcgtattgggtgattcataaaattcaaatttgatagccattcgcttatttgtttttatccggttgtttatgctttcttgtacggaagagtttgctgcaacttcctttcaggttaatcatttcactttggtgatgaaattatatcactaaagtgatgaagttgtatcactcaagtgatgaaacttcatcattctagtgaaatgattaacttgacggtgcaaaagtatgaaatagtcttgataaaaacgaataatttcccagttattttcgcttagtcacttttttgcagtagtgtgtagtaaatgcttgtaaaagagtattttgtatgttatctttgtgatattacacaaccccaaataatgaaaaaggatgaaaaaattagtggaaaaattactgaattggtgcaaaaagagtatgaaaatgaggatatgcgtgggaaaaagtgcgaatccggaaagagtgttgccttcaatggctatggaaacggtgggcgaaactgttcttccagcggctgtcgaggcagttggtatggcagaaactatcgatgaaaaggcggtttctggcaaatcggggcgcaagaaaccggagaatatgctggaggccttgcagtgctttttgaccgcacggtatgattttcgttataaccttctcaccgaacagacggagtatcgtggaaaagagatgccggatgaagagtatggtatagtggctcaacgtgatttgaatacattctgcctggaggcgcgtaccggcggcatcaattgctgggataaggatgtgagccgtttgctccattccagaaaggtggaaaactatcatccttttctgcattatatgaaccacttgcctcaatgggacggggtggatcgtgttactccgctggccgtgcgtatatcgcgtaaaccgatgtgggtgaaagggtttcaccgttggatgctgggtgttgctgcccaatggctggggcaggcacaggattgcgccaatgcggtggcgcctatgttggtgagccgtgagcaggggaagcgcaagtcttctttttgcaagattttgatgcctaaggaacttacaccttattatatagacaagttcgacctgacgagcgagagtggatgtgaacagaaactttcgcttttcggactgatcaatatggatgagttcgataagtaccgtgccggacagatgcctgctttgaagaatctgatgcagatgaccacactaactttccgcagggcacatcgtccggcattcagtcatctgcctcgtatcgcctctttcatcggtacgtccaatatgacggacttgctgactgatcccacaggaagccgccgttttctttgtgcggaagtggatgataagattgactgcacaccgcccgatcatgcgcaattgttcgctcagttgaaagcggagttggtcgggggagagcgttactggttctcggaagaggaagagaaggagatacagcatagcaatcggaatttttataaaatgcctgccgagcaggaactgtttttgcgttgtttccggatgccgcaaaaaggggagctgtccaagccctataccacgacggatttgttcaattatttgcagaagcattatccggcagccatgcgcggggtgactccgaatcggttgggcaggatgatggttgcattaggaatacaacgcattcataccgagtatggcaatgtgtaccggctggtgaagctgaaggattcttccgcggcctgaagctttttcccggtgtgatctttcagccggaacgccctccggcaaagggtttgcgggagggatgaagcttttgaaggatttttcagggggaatcgcatatggcgaaataaatgaaaaagattgcttagcgatttgtttgttcgacttttttagtggtggcgtttttatctataaaaacacgagaagtgacagtttacatatttattacattgtttcttcttgtgattgtctggaaacgagatgctccaagtatcatgctgctccgggagatactttacagttgaaagtttccttccagtcggacagtataggggtgtttgtccgtgaactttatatttatggcaactttccctctttgccacttagtctgacggtggagggcgattgcatataaggcaagctcatagcatataagagaaagaattaacaggataattttgtttttatcgaaggtttattactaactttgctctaccatcgtaatatggatgaaaagcacaaccgatatacaaatgagcaaaatgcctggaaattcttttaatgatatctatacctcttattataagaagtcttttttctttgccaaatcatacgttcataatgatttggcagcagaagatattgcctccgaggcattaataaagttgtgggaaaagttgaaggccgagcctgttgaagagaaatatatcttaccgttgttactggcaattttgaagaacaaggccttggactatctaaagcacgaggaggtaaaacgcagcgcttttgaagtgatggccgactggcaacaacaggaattgtctatccgtatgtctgccttggaagcgtgcaatcctgatgagattttttcggaagaagtggaaaaaatcatcagtgctactttaagcaccttgtcggaacagacgcgacgggcatttattttgagccgttttgaaaataaatctaataaagagattgccgaagagatggaaatctctataaagggggtggaatatcatatatcaaaagcattgaaagtactgcgggtgactttaaaagattatcttcctttattttatttcttcttttattattaagcctgaccggatggggatacggatgtttttgaggacaaaaatgatttttatatatttttcttcattttcttttagggtaatttcttcttgagtcgtttctaataaaacagcatagaatatgaatcctgaattattgcaaaaatatatagccggaaatgctactgaagtcgaaaagcagcgtgtgaccggatggatacaggaaaatcctgagaatatgcgtgaatatatggcacaacggaagttgcatgacatggcattgtggcgtacggaacctgtggcggaggagaatagccgggaaaggaaacatttctcgttacgcggaatatgtatggaagctgccaagatagcagcggtattggcgatcgtcttgttgggtacacattattggacaggaaaacatcaggtaccggaagacaaaacatggcagtccatttatgtgccggcgggccaacgggcggaattgatgttggcggatggtacgaaagtctggttgaactcacgcagtaccttgactttcccgggaagtttcaaaggggatatccgaaatgtgaaattggatggtgagggttactttgcggtgacaaagaatgtggaacagccttttattgtagagacgaacaaatgtaatgtgaaggtgctgggtacagagttcaatgtaatggcttatgcagcggatagcgtatgggaaacttctttgttggaaggtgctgtcgaaattttagtgcccggttcgaataacagtggaatgaggctggaaccgaacacgatggccagcttgaaaggcaacagactggtaaaaggacgcatcaaggagcccgattattttttgtggcgtgagggcttgctttgttttaatgatatatccgtacgtgatatgatagagaaactgaaactgtattatggggtggatattgtggtaaataatacccggattttaaagaaccgttatacaggtaaattccgcacgaaagatggggtggaacacgtactgaaagttttgagactcaataataagtttacttatacaaaggatgatgagacgaatgtgataacaattaattaacccttaaaagagaatatgcctatgaaataacacacatggtctaaaaaggaaatgggatagtgctgcaacaccatcccatggaaacgtcaattacgtattgacaatttttttctcaaataatcttaagttgaacctaaaattagtaatgcaaatatatgaaaaatattttgtatcaggaatctattgtagaaattaaacatttattccgtatgatgagaaacacactcttagccctgtttgtctttgccggaacagcttttgccactgagtcttattctcagacaatgaaggtgactgttgtggcggataacatgtcaacaggcaaggtaatcagtgaaatagaaaaacagacagattatctgtttgtatataatgtaagcgaggtgaatctgaagcgcaatgtgaaggtgaatgcgcaaaataaatctgtagccgaagtgttgaataaggtttttgaaggtactgatatttattatgccatggagggtaagaatatcatgctgatgagcaaggcgaaagatggggaagttgcccaacaggcaaataaggtgacaggtattgtgaaagatacgaatggcgagccgataatcggtgccaatgtcacggtgaaaggtcagtcaataggtacgataacagatatagatgggcggtttgtgttggatgccccgaaagatgccgttttacagattacgtatattgggtatgtttctcaagaagtgaaagtttctggaaataaagaacttaatgtagtattgaaggaagatacagaaacgctggatgaagtggtggttataggttatggtacttcccgtaaaaaagacatcactggttctattgcttccgtaagggcagaagagttgaatacggtaagttcttccagcgtcagccaaatgttgcaaggaaaggtaactggtatgaatgctattcaatcttccgcacaaccgggtgccagtatttctatcaatattcgtggagccgcatctccgaacggtgacaactctcctctttacgtcatcgacggagtacccatgcaaagtaactctaacgctgatcccggattgtctggaacgggaaatggattcaaatctggttctagccgcgatccattgaatacgatcaaccccggtgatatcgaaagtatagaagtattgaaagatgcttcggctgcagctatctatggtgcttcggctgccaatggtgttatcttgattacgacgaaatctggtaaatcgggaaaaccgaaagtggaatggagaagcacggtaactgctcaattggagaaagactatccggaagtgttaaatgcacacgaattccgcgaacaagccaacctgtggaccaaagaatattatctctatcagaacaaaatgggagtctacggcaacaatcctatcaacttcaccgggtatacccccgtatttactgatgtaaacgattactatgcagaaacgaactggatggatgaaatttcccgtagcggttacgtcattgaccaaaatttgtctctcaacggcggaacggagaaaactaaatattatttctcctacaactactataacaacgttggtatgataaaaaaatccgatatgcgccgccacagcatccgattgaatttagaccagactttttccgaccggctgaaaggaggaatcaaaatgaattactccaacatcaaagcgggcaacacgtctattggtagtgaagacaacgcagcttccatggtaatgaatgctttgcgttatgctccggatataccggtaagaaacgaaaatggtgaatatacccgttcatataataaactcatccgcaatccagtggcttaccttgagacagatgacaagacgaccacggaacgtatcttcatcgtgccgacattggatttgaaactgatagacggtttaactttgcgcggagtgggcggattcgatacgcagataggtgttcgcgaacgttatacaccgtcaacagcattagatgacaactatccggagggacaggcacagttaggtagttctaaagtgaccaacatcagtgcagaagcgttttttaattacaataagacattcggcaacatccatcgtatatcagcagtgttgggaactggttattataaaatgatgactagcggattcggactcaccggtgtagacttcctgacggatgcattcggttcgaataacgtaggtattgccagtaacaaagaaaaagaagtcatacggtcgtggagaacagaacgtgtcaaattatctcaatttgctcgcttaaattattcgttgaaagacagatatatttttacagtcaccgctcgtcgggacggttccagttattttgcagaaaacaataagtgggggatcttccccagtgcttctgtagcatggcgtgtcaatgaagaggtttttatgaaagacaagactccgttcagcgacctgaaactgcgtatcggttatggtgctgtgggaaatgagaatgtattgggtagtaacgcgttatctctgtacacaagtgacacgaattacaaatatctgataggaaacgttatgagtaccgcactcttattgacacaaattgaaaatccggacttgaaatgggaaaccaactatacacttaatatcgggttggactacggactgttcaaccaacggatttcaggtacaatcgagtacttccgccgcggagtaaaagatttattagactggcaaatactgccatctaacaatgccgtgggacgtgtagcagctaacatcggcgagactaagagcgaaggtttcgaattttcattcagaagcgataacctaccttccaaagtattgaaatgggaaacaaccttcaatttatcttacttcaagacaaactgggtaaaacggaataaggaagtggctttagcggaatacattggtgaaacagacgaactggatgctatctatggatggaagacagatggtattatcacttccaaagaagacattcccagctacatgccgaatgccaatgtgggtaatatcaagtatgtggatataaacggtgatggcgttctggatactaaagatgtagtgaaattgggcaacaagacgccgcgctggtttgcaggtttaggtaataccttcagttataaaggtttcgatctgaacatccatttctacggagccttcggttacttgaaagagagaggacaaaagcccgatcacgccattatcggtaataatcaaactgcaccgggaaatacctacaaaaacctcataacggatgtttataacagccagaccggacaaggttggatgccgggagtcgccagtaatccgtacgatagttccaatccatcgaatacacacgatttccattacatgagtggtaattatatcaaactaaagaatatcactttgggatatactttgccacagaagatatttgcaaacagcaagttcatacaaggtgcacgtttctttgttgatgcacaaaatatagcgactttcactggttatgaaggattcgaccctgaattaagcactgataatccgtatccgcaagcattgtctctgtcattcggattcaacctgaacttctaataactaaaactcatctattaaaaagcgaattatgaaaaagataagtaaatgtatatgctgctgcattgcactggcaggattggttctcacctcttgtaacgatatgcttgaaaccaaaaattttaccgacatgacgccttcgaatttctttaagacggaaagcgatatagatgcctccatcttaggactttatcttccctgtacgacaaactggggatttaccgataaaggtgtgggatattatcagacggggttgttctgtgcagatatcaaaagtacttatacctctgcaatggttacaactgatataatcaaaacttacagcagcaacccttatgaagagttcatcgtaggaccttctacagtggtcagcggcaaacaaggaggtattcttgacacatacaaccttatgcgtttcgtagcccgtgcaacggatatcatcaaccagataaataactgttcggcaggaactgagaatgtgcgcaaccgctacattgccgaggcgaaaacattacgtgcctattatatgtacaccttgctggattggttcggtcctgtcaatgtcaagctcgatcctgtaacgttgatggacaataccgtcgagccacgaccggatgagctgacttacgtaaaatatatcttacaagatttggaagatgccatcaatacacaggcatttccgaacaaatataacgatgatgcggggaattggggacgcatgtccaaagccatcgcgtatgccgtccgaatgaagacatatatgcaccaaaaagactgggcaaatgccaaagctgatgctttggaattaatgaatatgggctttgagattatttccaactatgaagatgtattcaatttagaccgaacagcagaacatatctggtctgttccttccaatacagcctcagacaattattatataacagaacttctccctgctgatttcaaacgcggatacaatcatgagaattggagttatatcaggggcacggaaaatgattaccaaccgggatggcaaatattctgtatgcgttgggatttttatgacacattcgaagattgcgataagcgcaaagcgacaattctgtgtaaatatgatacaaacgaaggaaaaaccaaagaccgaaatagcggcatggtcggtgcacttccactgaaatatacagatactcaattcaagcatgcaggtatacaaaaggcatttcctgtcatccgttatgcagaggtgttattatcgtatgcagaagccgaaaatgagctaaacggtccgactcagaatgctcaaaatgctatccaaccgatattaactcgagcaaacgtaacgataccggcaactgccattgcaaataaagaggctttccgggattatttgctggaagaaagaggacgtgagttacattgcgaggggcaacgccgccaggatcttattcgtcacggagtatacatcgagcgtgcaaaaaagcgtggaaatgatgcacaggattatcaggtattgttccccattccgcaaaaagtaattatcgaagcgaacggaatcatcgaacaaaatccgggttatacgaattaaatccataatttctaagtaggcttgacgaataagcctacttagaattacaccgacattaagactcgtttttcttttttttgataaaactgcaaaccccatgaaactacaattattcttgatttacataattttatcctttagcaccaatacatgggcggataaaggatacactatcatcctccctaatcatccagtacctacagagggacatctgaaacaaggaagccatacgtccccttcaggacagacctttacactgaatagcgtatattacatgaaaaacggtaaaccatggtatcccgtttcaggtgagatgcactatccacgtgtgccccgtgacgagtgggaagaatcgttgttaaaaatgaaggcatccggagtgacggtaatagccacgtatgttttttggaacatacacgaagaagcagaggggcagtatgactggaaagagaacaaagatttgcgccgattcattgaattgtgccggaagcacgacttgcatgtatggctgcgtatcggcccttggtgtcatggagaagcacgctacggtggtttccccgattggttggtatcgatcgaagggggtactagaaaagacaacccagtgtatctgaaatatgtgcaacgtttttttaatgaaatagggcagcagacgaaaggattgtatttcaaagatgaaggtcctatcataggtgtgcaaatagagaatgaatatgcttttaataacaggtcgcgtctgaaacatctcttaaatctcaaacggatagccatggaggccggtatagataccccatactatacggcaacaggatggccccaaggtgacttgaagcagacggaattgattcccgtgtggggaggttatcctgaagctccatgggattcgcgggtaacggagttacctttgtcacgaaattatctgtttggttcttgggcaaatgatcctgcggtcggtgcagatttactgggaaagcaagaatctgccacgacacaagaattgcaatatccttatagtacggccgaaatgggaggaggtaatcagattacttatcaccggcggcccattatcgcatcgaaagatatagtggcccaaagttatgtaaaggtggggtcgggagctaatatgatgggatattatatgtatcatggcggctccaatcccattgggaaatatacgacatttcaggaatcgagagcaacgaaatatcctaatgattaccccattataagctacgatttctatgctccgataagggaatacgggcagttgcatgagtcctatcatgggttgagggttctacatacatttctaaatgattttggagcctccatcgcccccacgagtcctgttttcccagccgggaattcatcccatccggaggacaacgaaacattgcggataagcgtacgcagtcaggaaaatagcggatatatatttatcaacaattatcagcgactgctcgcaatgaaggaacaaaaaggaatctgtctctgtattcaaactttggatggagaaacgttgaaattcccatcattggatatcgcgtcagacgaacagttgattatgcctttcaatatggatatcgacggacatcgactgaagtatgccaccgtgcaaccgttttgcatcttgcaaaataaagtgcccacttatgtatttttttctcatcctaacactatttccgagttgtccttctctgccgagaccttgaaagaagtgactttgaacgggcaacgtgtagataagacagggaatgtctataccctaaaatgcaagagcgggcagacacaactgattcaactgacagctacaaacgaaaaacagacgaatcttttgttactgacagaaaaacaggtttcccgaagctggaaaatcaatcagaagggaaaagattttttatgtatcacttcttcccagctcataccccatttggaaagcctcacgattcgtaatatcgatgagaatcagtttgaaataaatatatatccggcagatggtaactggggggtaccaaacggattatcagtgataaatgaacggaaagggatcttccagaacctgcgtttcgagacaaaggcagcctctttacctgtttcttttcaggaggagaagcatccggaattgcatattccccgaacgctgctgcttccggaagataacagactggaaaatgtgccggattcttgcccgggacctcagtatttcgtcaatttcaagccagttcctacttcttcgtattacacggtaaaagtaccccagctgccctcttccctcaaaaaggcttatttgatgatagactacacgggtgatacaggggcattgtacaacaaaggtactttagtagcggacgatttctatgcaggagctcctatgatatatgatttagggagaaagactccacaacatcatagtgaatatttgttccaagtgattcctttcagtccagaagtaaatatttatttagattcttcagcaaggaagagattgacgttatctttgcagggagtacattcagtccgtattgttccagtatatgatatgatacttactactgttaactaagcaatattgattaaatatgaaaataaaaatttacattcatctttggatttcctgtgtctttttgttctttcttatcgggaccatgcaagcacaacctcaatggatcaccgccaatgacccgaaaacagatgaggctaatacctggatcgcctttcggaaagacatctccctcgttcgggtacccgcgactgccgttgctcaaattgccgcagatacaaaatactggctttggatcaatggtgagatagccgtatttgaaggcggactgaaaagagggcctaccccacatgacacatattatgacgaaatcgacttagctccttatctgaagaaagggactaataaggtagcgattctcctgtggtatttcgggaaagacggttattcacacaaggacagtggcaaatccggacttatcttcagcatggaagtcggaaggaaaacaatctacagtgacagtacatgggtgagtaggatacatcctgcatacgaaacggcactagatcccgctcccaactggcgattaccggaatcaaacatacgctttattgccggaaaagacctcgcaaactggcaaactgtaacagataaggccgctttgggttttaccccttcaaaagaaataggggcatggggagatgctccatggaacaccttggtaaaacgtcccatccccttttggaaagatttcggcattaaagaagcacgattagaacgcagtgagactgaaaaagaaatcatttacactgcttgtttgccctacaacatgcagatgaccccgattatcgacatagaggataaccgaggcggcaaccgattgtttatcgaaacagaccattggaatgggggaagtcagattaatttgcgtgccgaatatgtcacggctccaggacaccggacgtacgagtcgttaggttggctcaatggacagaaaatcatcattaggcacgataaagccgccgacgtgcgaatcaatcggatttcttaccgtgaaaccggatatgacgcagaacccgagggtagcttcgcttgtgacaatgactttttcatacggttttgggagaaaggattaagaacactctacgtaaatatgcgcgacacttatttcgactgcccagatagagaacgtgcccagtggtggggagacgttgtcacactgatgggagaaagtttttacacctattccatctcgacacatgcattaatgaaaaaagccatccatgaactgacaggatggcaaaaaagtgatagtgtgctcttctctcccattcctgcaggaaactataaagatgaattgcccgcccaaatgctggcaagtatcggtgaatacggtttctggaactactacatgaatacaggagataagcaaaccttaaaagatgtgtatccgcacgtgaaaaaatatcttggaatatggaaattggacaaaacaggactgaccgaatatcgagctggaggatggtcgtggggagattggggaagcaatatcgatatccgcttagtgctggcaggctggcattacattgcgttgaagagcgctgcccgaatggcagaactgttgggatatccggaggatgccgttaaatatcggaccatcatgaagagcgtgaagcagggttataacaaatgctggaacggatatgcctatcgtcatccgcagtatcagaaagaaacggacgaccgtgcacaggcactggcagtgctttcgggtattgccgatgcagaaaaatatgaccgtttgttcaatgttctccagacgcaatggcatgcaagcccgtatatggaaaaatatgtcacggaagcccttttccaaatgggaaaggggcagtatgcgctggaacgggtagagaaacggtttgccccgatggtcaacgatgctaactatactactttgtttgaagactggagggtcggcggagctggtggcgggtctaccaaccatgcgtggagtggaggaacactgaccgttatcagtcaatatttatgcggagtagaacctttggaaccggggtacaagacgttcaaaatagaaccacaaccagcttcgttcaaaacagcagcaattagcataccgacagtagcaggtactgtcaagtcggcgttcgaaaacaaaacagataagttcaaattgacagtaacagtgccctccgacacacatgccattgtttacctgcctttatcggaaggaaagacggtgagcataaatggaaagctgccggagcaatctcacactgatattcctgtgaaattcctcaaggaaaacaaacaggtctatcggctcgcaacaggagaatatactattatattacaatgaaatcttattattcatttaaaacataacatttatgaaaactatatttaagagatcattgtttacacaagttttattgtgttgcgtgttggctatttttgcacaggattcattccctgacggcacacccgtctccgaatggtttcgacagacaaaaccgattgacatgagtacattgggtaatcgttactgtattaccgattatgaagtagtaaatgacagtacgattctccagacacaaaagatacaggctgtcattgacaaagcccatcaacaaggaggaggagttatcgtagttcctcaaggaactttcttgagtggttcgctttttttcaaacccaaaactcatctctacatagaaaaaggaggaacattaaagggtagtgatgatattagtgacttccccttggtaatgacacgcatggaaggacaaactgtgaaatattttgtagcactggtcaatgccgacaaagtcgatggtttcaccatttcaggagaaggctgcatcaatggaaacgggttacgttattggaaatctttctggctacgtacacaatttaaccctaaatgtacaaatatggatgaaatgcgtccgcgcttgatttatgtttcaaatagcaaacacatacaactttccggcttaaaattaatgcattcaccgtattggaccactcatttttataaatgtgaaaacataaggttcttaaatcttcacattacctctcccaatcggccggtaggagctcccagtaccgatgcgattgatcttgacgtatgtacgaatgtccatattaaaaaatgctacatgtctgtcaatgatgatgcaatctcattgaaaggaggaaaaggtcctcacgctgacaatgataaagataatggtataaaccaatatatcattgttgaaaactgccgatttggtccttgttgccacagtgccttcacatgtggcagtgaatcagtacacagtaaaaatattattttccgagactctcaagtagatggtccttattgtgttgtcaacctgaaaatgcgtcctgatactccacaacattacgaatatattcttgtagaaaatattaaaggaaatgctaacaggatgttgaatgtttctccatggactcagttctttgatttgaaaggagaaaaagatataaaaatctcacgagccaacaatcttacattccgtaatatccaattggattgcattaacgctgcaactattaaaagttccgaacaatatgaacttttcaacttcacttttgaaaatttgaagatagaagcatcagaaaatcccaatataaacacggaagctgttaataattttataatgagacaggtagaagttaatggaaaaataaagactttataaatcaagatctcttaaaaagagttttccaatcaatatccatactagatggttgtctttatgtcatacaacccactagtgtcttagagtcgaaaatgttagaaatatggttattgattaagtacttaattacaccaacaagttgcaaattcttgaatttcttcctagctttgtattcgtttgtttttaacaggagtacttgcgtgaagaatatgaaaaacataggaaggatattattaccaatcattattttgttattgactgtgcggataaatgccgttccggtcaaagcatttgatatgataataagaaatcttcctaattcggaacagttgccgaccaaagaattgctttgtatcttccaggattcggaaggatatatgtggtatggtactgaggggggaggcttgtgccgtgatgatgggtatacagtgaaagtattccgttctgatttcaagaatccgggagtcttggaaaacaacagtgtgacgtgtattactgaagacagtgaagggaaaatatggtttggaacgaagcgtggtgtctatattttgtcaaaaacagattatgagataagggtacttgctgatgaaacgataaagagttggactataactacaatgacagcgacgtctgatggtatgatctggatttcgactaacaggcacctgtttcgatacaatgcgtcaggggaaagaactggaaaatacattcttacatggaaaggacaggagaataccgtcaattctatttatgaggataagaaaaagaaagtttgggtaactcaagcaaaaggtgggcttttttgctatgataaggtaaaggactcttttatttcatatccttggccctatgatgagtatcccacaagcatgacggaagatcataacaccccgtattattgggttactacttggggaaaaggtattgtacgttttgatcccaaggcacaggatacagacaaaatgtttggattgcaaacagtagataatgcgtcttctaactccgatacccgaaagcttcatcatatcatacaagattctgttaagggatatttgtgggtgactgcggcagataacttatatgcctataaaataacggccgatgcatctttggataaggtagatctctctcgtttattatcagctgacaggaaaatcctcacaaagattctttccgatcaatccggaaacttatgggtgacaggttattatccttcttctttcattatttcttttcttcctaatgaagtgcttcctttgtctatggaaggggtaaagcaaaatttgggggtaatcgcgtctcctatgcagttttctcaagagaaaaattattattggatcaggcaaaagaaattgggactatatgcttatgatccccagagagatcgtatatctgttgttgagaatgacagggagctctcttttttctttgagaggccatcggacagagagggactctatatggtaagggatcattcggtaattttaattcggtataaggggaaccggctttttgaatccatcgtatgtgccatacccattaaacaaggtgagcgtatccgtgctttgcatgatgaccaccatggaaatctttggatagggactacttaccatttatttcggtatagcttggaggaagaccgattgactacagtttgtgatgatgttagttttataaatgctatcgtttcgtctaatgaaggagttgtttattttgcaactgaaagtagagggttgtggagaatttccggagaaagccggttgcaaataaaggatactggagaaaattattcggtattgactgtcgctccggacaacaatctctgggtgggtactaaacagggtaacgtgtatagttattctccggatacgaatgattttatttcccggacaaaagattgtggattgacaggggatgctgttttggatataaagtcggatgacaatgggaatctttggattcttacatcacagcgggtgatggtctatcatcccggaacacatatctttaatatgatgtcttgtactgattcttggataaatttggaagatttccaatcattgtataaagaccctcggggagaaatgagcgtgggtggacgaggtggaattgtgacttttcctcactataacgaaaaaaagaggaggatacctgagcccgtggtgcgtttgacatccatcaaaatgaataacctctctgaaataggagtggataatcaagagaaaataagactgtcccctcacgagaggaatgtggaattgtttttttcaacttttgatcatttgaatacaaataaggtaagatatgcttatcgttataaacaaagaaacgataagtgggtgaccttgccggcagggaaaaatagtatcggcttgtctgatttgtcaaagggggaatttgaactggaagttcgtgctacagatgaaaacggactgtggagtaagagtacattgacggttatgatccagtgtctgcctgcttggtatgaaacaggttgggcgtatttgttttatgtacttgttgttttatcggttgtttggggattgggccggatgtatatgaaattacggaagcccattgttgcacagactgttctgccactggaacaaaatccggagcaaaggcatgagatagatccattgccggaagaagagaaagtagaagcgaattctatttcagcatctgatgagcaattaataaagaaggcattggacatggttgagaagaaccttagtaatcctgaatattccatagaagatttaagtagggatatgtgcatgagtcgtgccactctttaccggaagattacatctatcaccggaagttcgccttctgattttgtgaagaatgtacgtcttcgtaaagctgcggaattattgaaagagggaggtctttccattgctgagatagctgataaggttggttttaatacacctagttatttcacaaaatcattcaagaaactgtttggggtattgcctacacaatataaataagcttataacgggctctgtcgttttattttgcaacatttgttccatatcttgcaacgtgtgaacggtttgtatcgaagagtgttttctacttttacaacctataaagaatatgaaccaataattaattaaaaacgatttgttggatatgaaatgtattttgttgtttttatcgttagtctgctcgttgagtgtgagcgcacagtattgttcagaagtatggtctcccgacaatggggacggtacctataccaatcctgtgataaatgctgattatagtgatcccgatgtggtagctgtaggcgatgattattatcttacagccagttcttttaactgtatgcccgggctacctattttacacagtaaagaccttgttaattgggagataataggtcacgccttgcgtagccagtttcctgattctgtgcgcacacaacatggtatgggtatatatgctccgagtataagatatcattcaggcgaattctatatctattggggagatcccgatcggggtatttttatggtgaaaaccaaagatcctgcaggtgaatgggaaaaaccggtgatggtggttgaaggtctcgggtatatcgatacgactccgttgtgggatgaggatggtcgttgttatcttgtcaatggatgggctaacagtcgtataggttttaatggtgtgcttactgtacgtgaattgtctgctgatggtacacgcgccataggtgagccatgtattgtattcgatggtgatgctacaggcaatgttactaccgaagggcctaagttttataagcgtgacggctggtattggattctttgtcctgccggtggtgtagctggaggctggcagttggctatgcgcagtaaatcgccttatggtccatatgaatggaaacgtgtattggaacgcggaaaaaccacgatgaatggacctcatcaaggtggatggatacatacaaaatatggtgaagactggtttatacattttcaggataaaggtccttatggccgcgtgtgtcatttacaacctgtcgattggagtagtggatggcctgttatggggaatgctggtgagccttactggaaattccgtaagccgaaatcagatagtaagactatagttaatcctgtggagactgatgagtttgattcatcaaaacttggtatgcagtggcaatggcaaaatgattataaagaaagttacgggcaagctacaagtatggggtttttccgcctgtttacgtatgcattacctgagcttggagatgtcagtaatctgtggtatgtaccgaatatgctattacagaaaacaccggctgatgaatttacagctaccacaaagctgagtttttgttcgcgtaattcagaccagtatgttggtcttgtctgtatgtcggccgaatattcgtctgtgggtctgcaacgtaccgaggacgattacgagttacagatacgccataatccgaatgccatgcgtactcacttgactgatgaggtgttaactgtggataccttgaaacccacacaaaaaggaactccacgtaagggacgtcctgcggagatgcatataaaggatgtgtacctacgcatgagtataaaagacagcaaggtgaactatgcctacagcattgatggaaagaaatggaagaaggctggtggcgagtatgctatgggcaaaggacgttggataggttcaaaaataggattttttgccgttgatccaaataagaccggtcgcaaaggatttattgatatcgactggttcaggatttcccgatagctactctgtagtcgtatcttgcaacatttgttccacatcttgaaacgtgggagcggtttgtatcaaggtggattttctacatttgctgttgataaatcaatgaataataccatgaacagacagaatctacttattttattatgtatgcttttgctttttcccgtatccggacagagcaataaccgtgagaaatataatttcaaccctggatggttgctttatatcggagatacgccgggggcggaaagaacggatttttccgatgaaaactggaaaaaaattactttgccccgggcttttaatgaagatgaggcatttaaagtacatatatggggaatgacggatactatagcctggtatagaaaacatttcaggctccctaagactgcaaaagggaagaaggtctttattgagtttgagggagtacggcaggcggcggatttctatttgaacggcaagcatataggattgcatgaaaatggggtgatggcggtaggctttgatctgactccgtttctgaattttggtggagagaatgtgattgctctccgaacagacaatgactggaggtataaggagcgttcgactggaagtttgttccagtggaatgatagaaatttcaatgccaattatggaggagtacctaaaaatgtatggttgcacattactgataaattataccagaccttgcctctatacagtaatttacagactacagggacttacatctatgcatccgatattaaggtaaagacccgtgaggcggttgttcatgcagagtcacaggtgcggaatgagtatggcaagtccgttcatgtggattatgaggtgagcatttatgattatgatggaaaaagggtcagtacattccggggacaaccgacgacaatgcagtccggagaaacagttgtattgaaagcttctgcaccgttaaaagatcttcatttttggagttggggctatggctatttatatgatgtgaagactaccctgttggtgaatggccgtccagtggatgaagttgttaccaggacaggtttccgcaagactcgttttggagaaggaaaagtgtggctcaatgaccgtgtgttgcagttgaagggatatgcgcaacggtccagtaatgaatggccgggagtaggaatgtctgtaccgccttggatgagtgactactctaacggattaatgattgagcataatgccaatctttttcggtggatgcatgtcactccctggaaacaggatgtggaatcttgtgaccgtgtgggggtgatacagatgttgcctgcaggagatgcggaaaaagatgcgaccggcagacgttgggaacaacggaaagagttgatgagggatgtcattatttatatgcgtaataatccaagtattttattttatgaatcgggaaatgaatcaatcagccgtgagcacatggttgagatgattgccatacgggatcagtatgatccgtacggaggaagggcgataggttcccgggagatgctggatattcgtgaggctgaatatggtggtgaaatgctttatgtgaataaaagtgaacatcatcctatgattcagactgaatattgtcgtgatgaggggttgcgtaaatattgggacgaatatagttatccgtttcataaacagggagatggtcctttgcacaaaggacaggatgccggagcatataatcagaatcaggacaggctggctgtggagtttgtccgacgttggtatgatttgtggcgtgagcgtcccggaacaggccggcgtgtcaattcaggaggtgcgaagattgtgttttccgatacgcagacttatggacgtggtgccgagaattatcgccggagcggtgtggtggatccgttgagaatccctaaggatggcttctttgcacacaaggtaatgtgggacggatgggtggatgtggaaaactatcatactcatattattggtcattggaattatactccggatgtgagaaaacctgtttatgtggtttcatcgggagatgcagtggaactgtttgtaaatggaaaatccaaaggtttcggcagacaggattatcggttcttgtttacttttgattctgtgcaatgggagaaagggacgattgaagccatatcttacgatgaacagcataaagaattgagccgtcattctcttcaaaccgttggagagcctgaacggttaaaactgaccttgatgcatagtccgcaaggcgtctttgccgacggcgctgatatagcgatggtgcaggtggaagtggtggatggcaatggagaacgatgcccgttagctaatcataagataaagtttgatttacaaggcccggctgaatggagaggaggaatagcacaggcggcagataattatgtgttggcaaaagaacttcctgtggaatgtggtataacacgagtgatgatccgctcgacaacgcaaccgggaaatgtggtgctgaaggtggctgcggaagggttggcttcagaagaaatagctttcagtacgcagccggtagaagttaaaaatggcttaagtacctttttcccttccgttgggttgcctagccgctttgaccgtggtgaaactccgtcctcgccctcttataaagagaccaaagttgatgtcagagtggctgatgttacagccggaacaaatcaaagggatgcagggaaaagttttgatgacaacgaattgagcgagtggaaaaatgatggcaggttgaacaccgcctggattacatataaattggaaaggcgtgcggaaatagatgatatctgtatcaaactgaccggatggaggcagcgttcttatccgcttgaagtatatgccggagaacacttgatttggagcgggaacacggagaaaagtttgggatatgttcatttgatgattgaccgtccggtacgttctgatgagataaccatccgtttgaagggggctactcaggattccgatgcattcggccaaatcatagaagttgtggaacccaaggccggagagcttgatcttttcaaagctgaaggaggcaagaaggtacacaatgaactccggatagttgaggtggaatttttagaaactttgaatcagtaatttcagaaattaagaaaatacgtctatatttacatcaattataaaatatctttttatgaaaaatatattcatagggttgatagctgtttgggggctttttctcgtttcatgtgaaacaagggagtccatggctgaagtaatagaaagagggctggaggtttccaaacggcaagctgtctttttagcgaaggaagtggaaaatcagaaaggaaggcttccacggacttatgagggtggtgaactgaaaacatccgattaccgggcatggatttccggctttttcccgggagtgttatggtatttgtatgagaatacgcctacggatgaactgaaaagatatgcggaactatatacagaacgggtggagtctgccaaggatatgaccaccacccatgatttagggtttatgttatattgtagcttcggaaacggatatcggttggcaaagaatcctcattatttagaggtgatgactgtaggagcggaatccttggcaactcgttatgatgagcgggtaaaagctatcaaatcgtggaattcaaatgaaaaatggcagtttcccgtcattattgataatatgatgaatctggaatttttgttttttcttgctaagacaacgggggaaaaacgtttgatgaatatggctgacagtcatgcacagaccactcttcgacatcattttagagatgattatagttgtcatcatgtagtttcttatgatacgctttccggacaaccacattttaaaggtactcatcaggggtacgccgacaattcggcatgggccagaggacaggcatgggcactgtatggctataccatgatgtacagggagaccggaaagaccgaatatttggaacaggcgcggaaagtagcttcttatattaagaatcatcccaatttgccggacgataaaataccttattgggattttgacgcaccggatattcctgctgctccccgggatgcatccgccgctgctgttatggcatcgggacttattgaactgagtcagctggataaaagtaaggaaggagcggattggctggagctggcagaaatgcagattcgttctttgtcctctccggagtaccttgccgaaccggaaaccaacggaggttttatcttgaagcatagtgtgggaaattataataagaattcggaagtagatgttcccctgtcttatgcagattattattatgtcgaggctttgttacgcttaaaaaaactacagaatgagaactaggaattgtttgttgattgctttttgttttatttttttgtgtggaaaactgtatgctcagcctacaggtagtgaggaccgtatgtactgggtgcagactttaacaaggattgctgatcctgtgttggtcaatctcagtcagggcacgttgaaaaagaatatgccgtttgagtcactgtctgatgaacctttacgtagaagtgtttcctatctggaagcggtaggaagaaccgtttgcggtattgctccttggctggaactgggacctgatgatactcaggaaggaaagttaagagaaaggtatattcaactggtggttaaaggactgaaacaggctgtcgatccgcaatcagctgattatttgatgtttgataaccgtcattcccagcccttggtagatgcggcttttcttgtacaaggtttgttgagagctcccagacaactttggggaaatctggatgtggatattcaaaaaaaactggtgtatgagttgaaaagaacgcgtggcataaagcctaatgagagtaattggttgcttttcgcttcgatggtagaagcggccttgttggaatttacgggggaatatgatagtcagagattatattatggtgtaaaccgtttcattgatgaatggtataaaggagatgcctggtatggagatggggcagaattgcatctggattattataacagtttggtcatccatccgatgttgacggatgtattgtatgtcatgaaaaagcatggattggagcgtgctgagttcttggaacgccaattggttcgtcaacaacgaatggctgcccagcttgaacggatgatctctccggaagccacttatcctgtagtgggccgttctatcgtgtatcgttttggcgcttttcatgcgctttctcaaattgctttgttggacaagattcctcagtctctttccaaaggacagatccgttctgctctgacagctgttatgcagaggcagatatctatgcccggtacttttgatgaaaacgggtggctgaaaattggcttttcaggcagtcagataaatatgtccgaaccttatataaatacaggcagtctgtatatgtgtacagcggtctttttgccattgggacttccggcaaatcatcctttctggactgagccttatagtgaatggactaacctgaaggcatggaagggtgttgatgtaggggcggataaggctttgagaaaaggttaggtgtctatgaaaagaaaagtaacttaacttatttacccgggtaagtcaacttaaatgccgaagtaacttaacttacttggtctatgaagatagcttacttttcattggccagtttgtctaattttaaagagcatggagatttttccatattaaaggaaaaatctccatgctttatgtttgtatgtcaatagaatagctattgtgtaatatggaatccccctctacttttgcatggaataaattataaaactttaattgattggcaatggaaaacaacaagatgttcaaaagtctttatgatcgtattttatctgtgaaattcctaaatacagttttaataggttgtgctgtaatgggaggggcttgttctctttcgcatccgataaccgatatgaccaccaaagaaaaggcttgggaggagttttctcatcctgtagattccacccgtactaaagtttggtggtttcatggagagacagaaacaactcgtgaaggtataaccgcagatttggaagcttacaagcgtgccggaattggaggggtggtatattacgaccaggttcatggaaaggcggagaatgcgttgcctgcattatctccggcatggtgggatatgttgcgctttgcagcatctgaagccaaacgtatcggactttcctttgaagtgaatctttctaatggttttgtagcaggaggtccttggattactaaaaggttggggatgcaacgtctcatagccagtgatactcttgtcagcggtgaccaacatttctctgctatactttccaagcccggaaaagatgaatgttgggatgtggcggtactagcttttcctgctacccgacagaattgggaaacaagttaccaccgccgtcctcgtataacgacaaccccttctcatattttgggtaaatcattatttcagccagatggtacactcgttacaattcctgcacgtgctgccggagaatctgttttggtgaatcttgattttggtgaggattttaccgctcgcagcatcagctatcaggttcgtccacgtggggcaaaatcttctacaggggctatgaatcctcccgggcatccggctgagagtttttatggcttggggtaccaaaaattaccagatataggacagttggaggtttccaatgatggtattaattatgagagggtttgtgatttgaaacctatttatcagactccgagtaatcgttggattcaaaaaacaatttcattcccggcagtaaaagctcgttattttcgtctgaattttcacgattggtatcttcctaaagatactcgtccggatttggtgataggaaatttttctctttcttcacgtgcacgaatggaccaatgggaagaacgtgccgcactctattctgaatatattcagagaaatctaacaccaccttatgagggcgaagagacgatagacccggaaaaaatagtagaccttacagataaaatggattctgaggggaagttggagtgggaggttccggcaggagaatgggtgattatgcgttttgctcatgagcctactggcggtccgttgagacatgggcgtgccaatttaatgggattggaatgtgataaaatgtcggtagaagcggtgacggttcaatgggaaaattataccaaacctattttggattctttagctgctatcggttgtttgcctgcaggagtcaccatggatagtcatgaggccggttcgcaaaattggactccggggtttgaacaggagtttttacatcgaaaagggtatgatatgcgttgttatctgccggctatgatgggatatatcgtaggttcggtgtctcaaagtgacggtttcctatatgatatgcgccgtacaatggctgatatgatttctgataattattacggcacgttgcaaaaattaagtgataaggcgggagtgaatctgacagcacaggctgtggggaacggattgagcctggtggcggataatcttcaggcaaaaggacgtgttaataaaccacaaggtgaattctggacttcacatcctgatggagggtatgatgtgaaggaaacttcatctgccgctcatttttacggaaagcctattgcttcagcggaagcttttaccggcagccgttattatcactgttttgcagatcagaaaaattcggcggattatgcttatgcttttggagtgaatgaatttgtgttatgtgcgtctgcttatcagccttggattgataaatatccgggtagtacggctggcggcaagcattattgtctgaacaggaacaatacttactgggaatatagccgcccgttctgggattatcaggcacgttgttccgcattgatgcgtaaaggagtgcctgttgtcgatatatgtgtgtatttgggacagaatccgccggtgaaattggtaacttatcgccttcctgaaatccccgaaggttatgattttgatgtttgtacagctgaggcattagtagggcgtacgatggctgtggatggtcggttgaccttaccgacaggaattagttatagtttattggtgattcagcgtaataatgatatgcccttgcatgtgttgcgtcatatagctggtttagttaaaggaggtgtcatcgtttgtgggccacgtccggatggttccgattccttgaaagataaagcggaatcggaagaatatcgagcattggttgatgagttgtggggagagttgactactgtatcacagatccgtaaagtcggtaaggggaaaatttatgaaaatattccattgtcggaggttttgaaatatgaaaatattcgtcctgatatagcaataaaaagtggtaatacagcgaaggataaagtttattttgttcatcgtcgtttatcggatgccgatgtgtattttttgaataatcatagtgacagagcttttcatgatactatccggttgcgtacggatgcccgacaggcggaatattgggatgctgtgactgggcaacgttatatgatacctgtaaaagcatccggagaaaaaggtatgttgttgaacttgactttggctcctcgtgagtctggatttatagtgacttcaaataatcaggcaaccggtttattgccgagaatagcggatgtacaagaaacaattactccgattgagggtagttggaatgtttattttgatcctcgctggggtggtcccgggaaagtcgtttttgacgaattgatagattggacagtgcatgccgatacaggtatccgttattattcaggcacggtggtttatcataaagaattaaatctggcgatgcctgctcaaaatgaacggttactgcttcgttttcctcgcttaggttccttagcgcgtgtctgggtaaatggaaaagaagtcgttactgtatggtgctctccttgggaggctgatataacctcttatgtccatgagggtaaaaataatctaaaaatagaggtggttaattcattgatgaaccgtatgattggggatgcctcacttcctgaatccgagaggtttacttatgcttatcctcaaatagctactccgactgataaacttgtgccttcgggtattatggagcaattgaatttggtgtaccgacagtgtcagtaacaggaaaatgcgtttacatatcaatcaggaacaaaacactaaaatattatactttatgaatttacgtactatttttatttcatcgtttctgtcattgagcagcctgggggtgttggctcaggaacggattaatttaagcggtacatggcaatttgcatttgccgctaatcaaaaggaggcggaccgtttggaaaggttttatacgtctgattttgctaaaagcaaatttaaatcaactcctgttccatccaattgggccttgttgggatatgaagaaccggtttatcgaggattcaaggataatcaagccggtgagggattttatgtgagggagtttacaattcctcaggattggaaagacaaacgtatcttgttgcatttcggtggtgtatggtcatcggctgaagtttggctcaacgggaacgaactggggcgtcatgattgcggatatacttcttttgcttttgatgtgacgaataagctgaaagcggatgagcctaacaaactggctgtcagggtaaggcagatcacccgtgagtataagtttgatgtttgtgatgactggacttggggaggtatttatagagatgtaactttggaggctatgccggctaaacgatggattgatgatgtggtggtgcagacaacttttgaccatttgtttcaagatgcgaatctggacatacgggtgatgatcagtgataagcataagaatacattgcccggaaattatcctagtcccggcgagccttataagctatgtttcacactcactgacaaagaaggcaaagaggtggcacaaagacaaatggctatacctgcccatgtttcgacggatcgggagatttgtttgagcttgccggttgaggctccgcaccagtggactgccgaaactccttatttgtatagcctgaaagtggaacttttagaaaaagaggcagtaacacatacacgtatggaacgtgttggtttccgtcagatttccactgatggaggagtcttcagaattaatggacaagcagttaaacttcgtggggtgaacaggcatgatgaacatccggatgtaggtcgtgccactacccgtaaacagtggttggaggacctcacgctgatgaaggctgccaatatcaattatcttcgtctctcacattacacacctgccgaagggtttattgaactatgtgattcaatgggaatgtatgtgggtaatgaagtgacgctagggggagccggggatttgatgtatgatccttcattctcgggggcggttctgcaacgttcgtatgaaacgattgtccgggatataaacaagccgtctattatttattggtcaataggtaacgaagatcctttgacctctctgcacatggtttctgtaaaattggtcaaggcacttgatcccactcgtccggtactgttgccttggcgtcctgaagaatggcttcctaaagaagtggatattcttgctcctcattattggaacccgcaggaatatgaccggcttgccggacattccggacgtcctgttatttcgactgaatacacacatgcttatggcaatgatgcgtttggagggttggaagcacgttggaaggcattaactaaacatcctgccggagccggagcagctgtatggatgtgggcggatcaaggggttaagactcctgtccgaaagaaagagaaagatttgagtgaagatgaatacttaagaattaatacagccggttgggatggtattgtggattcctatcgtaatttcactcgtgactattgggagacgaaggccgtctatgctccggtttaccctgctgtggacaaaatttcatttgtacccggtcaggattcggtacgtattcctatccaaaatgattttgattttacgaatcttagttcggtaaagatggcttggtctgtacgggaagatgagaatgtattatattcgggcactgattccatgtatggttatcctcatacagtgtcggactttaaattgccggtagaaaaactagtgactgttcgtccgggaagaacttattatgtgtggtttatatttacagatgaaaaaggaacagagatcactcgcagggctgttgaactttgccctcagacagaacaaccgatatctgttcctgtttgtcgtgaacttttggttactgaggcggatcaggttaccattgaggctggtgatgttcgctatgtgtttagtccgaagaatggacaattggtgtctgcggaactaaagggaaagcagttgataaaagacttgtatccggctatctggcgtaaattaaatcaaggtgagacttccggatttggtaaagaaaatcttcgtaaggctgtcgatcttactcattatacgtcatcggtaacagcatggaaggtggagaagacgccaaccaatgcggttatccgtactactgtggattatagggtggatcaggagaatcgttttacagtgacttatcgttattcaataggagtggatggacgcttgaacgtttattatcagattcttactaaagtagctgtaccttggttgcctattgttggtatgtccatgcagtctgtatccgggcttgatcaggtacattggttgggattgggcccgtatgatgcttatcctaataagcaggctgctcctatattgggtgtatggggaggaactgcgggaagtccggatgtgacgggaataaaagcgatgcgctggatggaacgttccggatctgaaggaaccatacatgtttcgaattctggttatatggagaatgacgcaatgtgcccggaaagaacttatattttatcaggagtattcggtcgtccggagaaaggacgccgtgctgaagaatcggttcttcaacttcgtacagatacaggaaagccgtttgtaggcgagttcagtattatgttgaaggcagttcgctagattgttttttgaatgggtggaagattttccatgcaatttatcaatttatggttttcaataggttgtctatgatataaagttaaacaaaagtgaaggaagtatgtgataacggttgtctgtgatagatagccgttattttttatgtgatatctattggtcgtttagagaataaattccatataaaaggtcaaaaatccatattttggcatcttgtattgcctttttagctattcttggtttttatatctatttgtatttttacatagataaataattaattaacatgatgagtatgagaaaaaaaagatttggtatttatttacttttatcgttgatttttgtaattggcatgtcagctcaagttgttttagataattggggacaacaagatagagagggaagaaacatagatgttggttttcagaatcataaaaaaataatagtcccattgcattgggtagggaacgtacctcaaaaaatgaataaaccagtaagttttggtattccttttggtaaaggagaagtctattcggaagacatcttacagttgacctctactgataatgaaaaaattccgattgatacatggcctttagcatactggcctgatggttctatcaaatggagtggtatagctggtgtaattcctgtcggaatgaaaaatatggttgttgaaaaaataaggaaagaagataaattgggctctgaagagaaaccagacatggcatttgttacagtgcaagaaacaactgaaaacatacggattgagacggggcttatttccgtttatatttcacgtaaaggacagtacttagtagatagtttgctgtataagaatgtgaaagttggagagaatctacgtttgatatgtactactcaaagctgtcccaaacttgaaaatatctcgttaatttcttttgtagattatcagggggaactaaaatcagcagaagtggaacgtgtgggatatgtgcatactgtgataaaactgaagggggtgcacaagggtaaaactggtagggaatggctgccatttgttgttcgactttatttttatgctggtagtgaacaggtgaaaatggtgcacagctttatttatgatggtgatcaaaatcgagattttatttctgcattgggcattcgttggagtgttcctatgcgtgaggctctttataatcgacatgtagctttttcttgtgctgatggaggggtatggagcgaagcggtgcaacctttggcagatcatcgtatacttaataataatccgtcattacaaattcaacagttggagggcaaacgtattcctgactctcaacagtgtgatgaaagaagtcgtatattgttggatcattgggcttcgtggaatagttatcgtttatctcagcttacgcctgatgctttttctattcgtaaacgtgctaatgatgataatccttggatcggaactttttcgggatcacgtagtgagggatatgcttttgttggtgatataacaggtggtttagggatttgtttacatgatttttggcaatcatatccatcgactattgagatatcagatgcaaaaagtgaaacagctgttcttactgcttggttgtggagtcctgaaacggaaccgatggacttgagacattacgataatgtgtctcatacattaagtgctagctatgaggatgttcaagaaggaatgagtactccttatggtatatctcgtacctctacccttacttttattcctcaaacaggatattccgggagaaaaaattttgccaattgtgcaaaggagcttaccggaatgggagttttgttaccgactcctgaatatttgcataaacagaaagcttttggaatatggagtcttcctgatcgtagtactgcgtttcgaacttgtgtagaggaatatttggatgcatatattgatttttataaaaaggccattgagcaaaataagtggtatggtttttggaattatggtgatgttatgcattcttatgattacaatcgtcatacttggagatatgatgttggaggttttgcttgggataatacggagttagcttcgaatatgtggctatggtacaattttttacgtacggggcgtgctgatatatggtgtatggcagaagcaatgactaggcatacttcagaggtggatgtttatcatattggccctaatgctggattaggaagtaggcataatgtgagtcattggggatgtggtgctaaagaggctcgtattagtcaggcagcttggaatcgtttttattattatttgactactgacgaacggtgtggagacttgatgactgaagtaagagatgttgatcagaagttatatacattagatcctatgcgtttggcacagcctcgtagtaaatatccttgtaccgctccagcccgtattcgaataggaccagattggttggcttatgcaggtaactggatgacggagtgggaacgtacaggcaatcttaaataccgtgacaagattttggcaggaatgaaaagtattttgcttcttcctaatcggattagtacaggacctgttgctttagggtatgatccggcaacaggtgtaattactagtgaatgtgatcaaaatttgttgaataccaatcatttaatgactataatgggtggctttgaaataatgaatgaaataatggatatggttgatttttctcaatggaataatgcttggttggaatatgcacagatggtaaaggatgatcgttatcgaactcgtttgaaagcttatgctgcatttcagactcatgatgctgcaatgaaaaagaaattatggaatgatctatttgctagagtaggaggatctaaatgttctttaaaggtaaagacgttacttcctcctgtggttcctgctccattagatgaatcggatgggcttaacacgaatgatgtttctctttggagtcttgatgcgatttatatgcaagaagtaattccttatacctggtgaattgaaaagtagcagcagagttgattatttctattaaatgataaactaataggataaaaaatccatgtaaataagaaaatatccatgtttttatggtgaaatgtagagtttgctatcttttttaattgtttgttagtctgtacttttgaccattgacttttggaatctatattcgaaataaagattgaatacaattaataactaattaaatttttaaaacaatttgtgatgctaaaaattatgaaaacacaatcaatcaggatgctccttttttccttattattggggattgcatccgtagtgtatgctcaagttcaagtaacagggcgagtggtagatataacaggtgagcctattattggcgcgaatgttgtattaaaaggtactggtcaagggactataactgattttgatggtaagttctcattgtctgatcttcctaagaaaggaactttagtagtgagttacattggttatgttgatcaaacagttaaaatagaaggtggaaatttttgtaaaattgttttatcagaagatacagagactttggaagaggtagtggtggtaggatatggtactcaaaagaaaagtgatttaacaggttcggtaatgcaggttaaatctaaagatatcacctcagtgacggctaacaatccaatacaagcattacaaggtcgggttactggagtttctgttgtgaccaatagccgtccaggtgaatctcctacattgaggatacgtggtaatggctctattagtgcagggaatgatccgttgtatgtagtagatggatttcctttaatgaatggttctttaaatgaaattaatgctaatgatattgcatctatagaagtattaaaagatgcttcggctacagctatctacggatcgcgtggctcgaatggtgtaattatgattactacgaaaacaggaggaaaagattctaaaaatctttcatttaatgctaattatggatttcaaatgcctggccgattgattgaaacaatgtcgcatgatcagtttattgattatattaactctgcttatatgaattctaaaggtacgactgtttataatgatgaaaatccggctccagatactcacacagactggcagagagagacactgtatggctgtaaaccagttcaagattatagtttgtcattagatggtacgtctggtgatacacaatatatgctatctggaggtatttatctacaggatggattattacctagttctgaatttgataagtatacatttcgtacgaatgtacaacataaattcaataattttttgaagataggaacacatatgcagtattcatatacagaggcaaatatggcagagttgagtaattatcaaggtgcattaaatgatatttggcgtgatggttggcctactttgcctgtatatcgcgaagatggcacttttgcagtgccacaagacaatccaaggatatctactctttttggtgatgctgcctactggaatccggtagctaattataaagaggttacaacaaaatcaaatgtcagccgtcttttgggagatgtctatgcagaatttcaattagctaaaggattgacttttaagacgaattttggtcttgatattgctaataagcgtgattataattatacaacatcaaaaataacgacttcaactggatatggaaaaggtggaaatggatatacaaaaaaaatgagccgtcttaccgaaaatatactttcgtatatgaatgaatggggagatcatcgttttactgctactggtgtttattcatggcaaaattatatgtatgaaactttatctatttctggtaatggttttgcaaatgatgagactggtgcatgggatatgggacaagcaaatagggaaacagtcgagtatggaagtgataaatatgaaaattcgttgatatcatggactggacgtgttacttatgcatataaagatcgttatttattaacagctacagcccgttatgatggctcttctcgatttggtgagaataataaatggggatttttcccgtcaataggtttagcttggcgtgcaagtgaggaagaatttcttgcaggaaataaagttataactaatttgaaagtacgtggaagttttggtgttacaggtaatcaagagattggtaattacaaatcattagcacaactgaaagttgataattatatatataatgatactgagattcaaggcttttatgaaacaattggtaatcctgatttaaaatgggaacgtgccaatcaatttgatattggcattgatttatctttgtggaatcgtatccatgttactgcagattattatcataggaaaacctctgatttactttataatgtacctataccttccacttctggattttcttcaatgttgagtaatgtgggttctgtgttgaataaaggttgggaactatctattacaggtaatattattgatctgaatgatttgaaaattgatgcgacagtgaatttaagccgtaatacgaataagataaaagaactatataatgatgtacagtccataactttgaaatcagggttaggattaagtagttatttaaaggtgggagaatccttaaattctcgttatgctctccttgcggatggtattatacgtactgaggaacaacttgctgcctatagaaaaattgaggcaacagctaaaatgggtgatgaaatgtataaagatttagatggagataaccaaataacagtaaaagatcaggtaaatattggaacaacagatccgaaacttatttatggggttgctttaaatatacaatataaaaaatgggggattagtattttgggaaatggagcagatgattttgtgggaggaagttcttatttgcaaatttcagaaaatcagttgaatgcaagcactattggtgtcccatctaaatatgcatatgaacgaatgtggagtccttccaatcctaatggtacatatccggctgctggggcttctaatactcacgaaagtgatcgtgttaattctgggtggtactattttgttcttaaaagcatggctcttaattatgattttggtagaaatccatttaaggctgtaaaaggtattaagggattaagtgcatctctaaatttccagaattttataactttttctagtcaaagaggatataatccagaaaatggggatacatcttatccatggataaaaagtgtaagtataagcgtgaatgctaaattttaattttaataaataaggtaatatgaaaacatatatatttaatcatagtaaattgaatgtaaattggaggagcaaaatatttattttgttttttacaatagtgtcttttgtgagttgtactgacttatcagaatctacttatacatttattaatccaggaacttattataatacagaagaagaattgcaaagtgctttaaattctgtttatgctgattttcgtaaattcacagcaggatataaaacgttgatgactttagaattgttgacagaacatgcaatgccagcgcattcctccaaagatggagtgaaaaattttaactcttggcaaggggtaaatcagtcaactacatataatatacagatatgggatagtggatatgaattaataaatcgttgtaatgttgtgcttggtcgtggtgataaagtaaatatagaagagaaaaagcgtaatcaaatttatggccaggcgcgtttcttccgggcttatactatgtttgtgttgcttcgtatttatggaggactagctattccggaatcttatacatcaggtttgaatggtttggaaattcctcgtaaaacgattgatgaaacgtatgattatattattgatgatttaaaatattgtattgataatcttccgagccgttctcaatggggaaatggtgcctattataaggctagtaagggtgccgcgcaagctttgttgggtgatgtctatttaacaagaggatgtatggataattataatacaacttattttcaagaagctaaaaaatatttaggagatgtgatttcttcaggagaatatgaacttttgccggattataaatcactgtggtattggtttgtagaagaagcggcaaagaatacaaaggaatcacttttggaaattcaatttggagctacccaagtaagtgatttacattgttattttggcattaatacgaaagatgagtgtttgggtggaaaaatgtatgctcgtgcaggaattgcccataaaagttatttctcttttcaagatgaagatgtacgtaaacaatgctttttgacggaatatacaataactggtacaactactcgtcgttggtgggagcctgagtataaaggattttcaggtaaaggtgaaggaatgtggccttcgacttctccgggatgtgtaaaattttatgatcgtactaagtcttgttatgatactggaggctctaaagctaattatatagccatgagatattcggatgttttgttgaattatgcggaagtggaaaactatttgaatgggcctacagaggacgcatattctaaactaaatgctgtacataatagatctaatagtaatcctattgcgacaggattatctaaagaagcttttgatgatgcaatttttcaagagcgagtttgggaattcataggtgaagggcatttgtattatgatgaattgcgtacaaatagattgggaaagaatgtttatgagtataagacatatatgtttgagaatggatattataattgtcaaaaattacagtttgttccacaaaaaacattcttgtggaaaatacctcagacatcattagattccaatcctgcattagagcagaatcctgataatgtttcagatcctaagtaccctctgtagaatatagttatttgacaggtattttgaattctccacctcaatgagttgaaaaatagaatgtatgatataaagtcaacttgttgagggtggatgaatgttttatacaatgtatttatttttcataaaaatcaaggggtgataaattatttcttggttacaacttttactagtttgtaaaaatgtgtagttaattttatataaagaattaaaataagataatatagaatatgagatttcatggtggaagtataatgcttcttataagtatgtttttgatatcttgcgataagaaagaaacattatcagaagtggtggaaagaggattgaatgtttcaagccaacaaactatgtttttggcagaagaattggaaaatcaggaaaagaaattacctagaacgtatgaaaataatgaattgaagactgttggttataaatcatgggtttcaggttttttccctggagtgttatggtatttgtatgaaaatgatccaacagaagaattaaagagatatgccgaactatatacttcacgtgtggaaccggccaagaatatgacttctacacacgatttgggatttatgttgtattgtagttttggtaatgggtatagattgacacatgattctacttatttggaggtgttgaaaactggttcaaaatcattggcaacacgttttaatagtaaaatcggtgctataaattcttggggggctagaggtaaatggcaatatccggtaattatagataatatgatgaatcttgagatgttgtcatttgtagctaaaaaaacgggaaaggagtcttatatggatatgattaatgctcatgcgcaaactactttgaaacaacatttccgaccggataacagttgttatcatgtcgtttcttatgatacgattacaggattgccccatgctaaaaatacacatcaaggctatgcggatgagtctgcatggtccagggggcaagcatgggcattatatggttatacaatgatgtatagagaaacaggaaaaccagagtatttggaacaggcccgtaaagtggcgagatttattaagaatcatcccaacttgccttcagacaaagtaccgtattgggatttcgatgcaccggatattccaaatacacctcgtgatgcatcagcggcagcagtcatggcttctgcattgattgaattgagtcagttggataaaagtgaagaagcctcagcatggtttgatttggcggaagcgcagattcgttcattgtcttcaccggattacttggcggagtttggaactaatggaggttttattttgaaacatagtgtaggaaatttgaataagaattcggaagtggatgtacctttgagttatgcagattattattatgtggaagctttattacgtttaaagaaaattcaaaatgaaaaatagaataggaatatgggttgcctttagttttcttcttttctgtttaaaatcttatgcccaaccgacaggaaatgaaaacagatggtattgggtgaatactatggtaaaaatagccaatccggtattggacaatcttagtcaagggacactgaaaaagaatatgccgtttgaatccttgtcaactgaaccgttgagaagagaggtctcgtatttggaggctgtagggagaacaatttgtggaattgctccttggttggaactaggacaggatcagacaaaagaaggcaaattgcgagctaagtatatacaaatgacactaaaaggtcttaagaatgcagtcaatccagactcgccggattatttaatgtttgataatcggcattttcaaccactggtagatgctgctcatcttgtacagggaattttaagagctcctaaacaaatttgggggaatttggataaagaaacgcaggttcgtttgattaaggaactgaaaagaactcgaggcattaaacccaaagaaagtaactggttgctttttgcatctatggtggaggctgctttgctggaatttacaggcgagtgtgacacatatagactgaattatggaattcatcgttttttggaagatggttggtataaaggagatgcttggtatggtgatggtcaggaatttcacttggatttttataatagtattgttatccatcccatgttgacagatatccttgctataatgaaaaagcataatttggaaggaggggagaatcttgacaagcagataatccgtcagcaacggctatcagaacaattagaacgattgatttcacctgaaggaacctatcctgctgttgggcgttctattgtttatcgttttggtattttccatgctctttctcaaatgagtttaatgaagaggcttccggagaaacttctcggggggcaagtacgttgtgcgcttactgctgttttgcatagacaatttgcaactccgaataactttgataagaatggatggttaaaaataggtttatccggcaaccagataaatatgtcagaatcatatataaatacgggtagtttatatatgtgtgctactatatttttagcattgggacttccggctgaggactcgttttggacagaaacttatatggaatggaccaatatgaaagcatggaagggaatagatgtcggggctgataaagcattgcgaaagggatagttgatatatggggggaatataagataagtgttttcttgtttatttgttaaactctttttaatgactagtatttgggcaaaatacttagttatttaagggaatatattaaaagaaaacttcaattagacaagaactagatgtatcgaataaattattaattaaataattaagtttatgtcattaacaagtattatttgtggcatagcgttgctgacaataggtgaagttgggcctcagaatatgcccgatactatagaacctgttgaatcaccgtttgttatgcctttgtttgaaaggcctgtttttcccgaatctaccatattggtaaggatggaacaggaaggtatgtccactaaaccgattcaggaggctattgatagtatgagttgccgaggtggtggaacggtggtagttcctcccggtgtatggcggacaggacgccttatcttgaagagtaatgtaaatttgcatctttcggaaggagcggaattacgtttcagtggtaatataatagattatcttccggctgtttttacacgggatgagggggtggagctttactctcttggagcttgtttgtatgctgatggacaggagaatattgcattgactggaaagggaaaagtagttggaccgcctaccagttgcgagatatacaagtgtaatgaaagtatgtctagtgacaaggtgataagaaaaccgcttgccgaccgtatttatgatggaaagaatggtgaaggagtctttttgcctaagacatttgcccctatcaattgtaagaatgtctttgtagaaggtgttacatttgaacggggactgtattggaatattgtaccacaatattgtgaacatattttaattcgggggattacagtgaacagtttcggacatggacgtacggatggtattgatattgattcaagtaatgatgtactgatagaatactgttcgctcgattgtcaggacgattgttacaccatgaagtccgggcggggtaaggatggattgaaagtgaatcgtcccactagtaatgtcgttatacgtaaaagtatagcactgaggggagcaggcggtattgtgtgtggtactgagattgccggtggagtgagaaatgtatatatgtacgattgtgtttttgagggaacagaccaggctttccgttttaaaactcgtcgtccacgaggaggttttgtggagaatatatatgtggaacgggtgcgggctaatgtgaaaagacaggctttgtattgcgatatgcttggttctgcccgctgggtaggtgagttggcacagcgttatccggcccgtgagataactccacttacaccgtggtttgctaatatttccattcacgatgtggagatcaccggatgtagcacattggtggatgtgtctgcattaccggagaagccggtgaagaacttttttttcggcaatgtcaaagcacattgtgatcggattggcaaaatatgcgatgccacaaaattctcaatgaaagatgtaagaatagagagttgtgatacagtaatgcgtattgataattgtgattacgcctctttctttgggttcagcaatgtaactacaggtagttcggtgaagatagaaaaaacgggaggagaatgtcgctatttaaatgtgcagacatatcctcttgtcccagtaaattatcagtccattcgtcctggtgaagtgtggcttgatactgaaggaaaacctattcaggcccatgggtttcaagtgacttttcgtgaaggcaaatattattggtatggtgaggataaaactcatactctgtttggtaccaatcggatgtttggcggagtacgttgttactcatctactgatttttacaattggaaagatgaggggaggataattgaacctgctactgatccacattcacctttgcatcattgtcagaaattggaacgcccacatattctttattgtgccaaaacaggcaggtatgtatgctggctgaaatcacaaagtaatgatgggcattttgttattcctcaaatccgcaactacgcgcctaatatgatacagaagcgaaaagaatctgcatcgttagtaaaaagggggcacagtgcatcgaatgtcaccataaagacatataaatgccccttaccccaccatgcgacttgaggcaatacgcaaaatcacgactataagttgtcggtgttatccaaagtcattctggaacacattggcataagcattgttgcatgaatagatattcagcacatacttccttgatgtcctgacccatttggctggcacagagatgaacttaaagacaaacgtcttgatgcggcttgttgctttgagtccgaacctcttcacgtcaagcctcgccatgatgaatttatagaagttgcgtatgagtgccataagcagaagaaacaccgtgttttctcccataaaggattttggaagcctgttccagccgaatccgttattcatatcatcgaagatgcgttccttccctccacggaggttatagaattcgacaatctctttctcggaagactcgtagtcatttgtaaggatgcagcggtaggtgtattctccttcccacaggtcgagttcgccgtctatccgcttctgtctttgaatcacaagacggtatgccttccctttccatttctcgatgagaatggaggccagctcaaactcaatgccgcccaattccactttcttccaacctctgagggcaaagatgtcattgtagagcgaactgcatcggttagcacggatatagaaggtcttgcagtgtttagcaatctcttccactatctcttcagaacacgagccgcaatcagctctgaaacggttgataataagcttgttttgttcaaacctttcaaagaacctcttcagcgtgtccttctggtggaaacggacatttgtgttgccgtcgctgttctcaatgccgacaatcaagttgccaataaccgccacgccagggcgataaccaaggaacttcttgtatgtaggcttcgcatcaaacttctcagcctctatgaactggtggtcgaagtcaacgtcatacccctcgccctctttcagctgccctgtggacaataggcaattgaggagcagtgtattcagcttgtctgccgtgttgaagtcgtaggtcttgccagtgtcggatgtgtaggaaatgttatcctgggtcagttcctttatggctctaagaatcgtgtcggcactgcatgtgcgaagtgtcggatgaagcgaaaggtggtacatcagatgagtggtgacatcctcgatgcatgagccgccacaaaaataaacgctcataagcgaacggatgatttcgctgtattgataaccatacagcctgcatctcataccgagggttgagtcgattacagatgagagtctggagtcaaattgctccattattgaaaatattcctccaaaaggagtgagtttctcggatttaattgctacctttgccatgtctgtcgggtttgatacatattttgatttgcaacactaagataggtgaaaaatctgacatggcaaattcctgagcaactttttgttgctcaggtacttaaaaagttatatttgtaatagtgttgcggaattaaggttattctagaagctgaacattttatgggaccctatcattttgtccgcaatctgaaacctaatggctttgctgtgggggattttgacatgtatgctgatcccgatacaggaaaaggttatgtttggtttgagcgtcctcattgggagcagatatgtgctgaactttctgatgattatacaaatgtaaatggccggtattcagaacattttgttggaaaggttccaccgtttacacgtgaggcggcagcacattttgtaatggatggtaaacattatatttatacatcagggacaactagttatactcccaacccttcggaagtagcggtattcgatgattatcatggtgaatatacggtgttagggaatccacacataggtgatgagtatgcacattctttttgctcgcagattacaagtgtgataaagattccgggaaaggatctttatgtggctatggccgatcgttggctaccgcatactaataaaacggatatacccaagaaagactggcagtctttcttgacccggtacaaggatcaccgtccttatccaaaggattttgcaactcctaaagtggccgacagattttatacgcttgttaatcctaatcaagatgtatataaggctacttatgtatttctgccaattgtggtgaaggatggcataccgatgatagagtggaaagatgaatggaaactggaaaactatgaatagatgatttttcttttgttgatagggcacatccgtttatttttactatctttgctaatatggcgtatgtcgggaaaatgatgtacgtcatatatttaaatgcctggtatgaatctgattgaaattgtatgaaaacatatatttgtctgttatgggttgtttttgggtgtataggttgggaaatgcatgcatcggtagatgtacatcctacttttatcacgactagtgacggattggcgaataattcggtacgttatctgtttcaagacagcaaagggtttatttggatgggtacattagatgggctgagccgctatgatggccattcatttgtgacattccgtccggaatcaggcgataaaatttctttggcaaatcatcatgtaaagaagatacaagaagatcgaaatggtttcttatggtttatcactgctccggaattaatgagttgttacgatttgaaacatgattgttttgttgattttacggggtgtggggaatatagacggccttacaataaaatattggaaactgctgtcggggatatttggctgtggcatcatcagagtggatgtcgtaaaatagtctgtaaggatggaattcactcttctgtatcttttacaaaggaaaatgggaaattatcaactaatgcagtgaattccgtttatgaggatgaacagggagtgatttggatttgtactcagcttgggctgtttcaggtgacagaagagggatatacccaggtagttcaagatagtttgtcttttgtaggggcgatgtcttttcgtcacaagattttttttgtaacctctgatggaggtatttatgaaaagtcttcaggtaagaatttgtttttgacagcccggttgccgtggaaactttctgcttttaatacctatgagtcctgtcgtttacagaacgattgggtgttttttactcctgagggtggagaggtgtttagtatgtctgagaaaagattgattcatgattcatcgcttgatattcgtttaggaaaatgtgaaaaggataatttgaataatctgtggatttccaatggcactggtcttgtacattatattgatgtccggacacgtgccgtccggatttttagattaatgtctgatgaaaaagttaagttgataggggatgaacgttatcatatcatacaagatgttccacgtggactgatatggatttctacctatggtaatggtttgtttgtttatgattctcaaaaggaggagatgacccattactcgtatcatgtggatgagtttaatcgggtgaattctgattttcttttatatgctatgggcgacagaaccggtaatatctggttgggatcagaatattccggcatagctttattgtcagtattaaatgatggggcaacttatatttatcctgaaaatgagaaattggtggatcgttccaataccatacgtatggttacgtgtatggagaatggggatgtgcgggtaggaaatcgtcgggggggattgtttgcttatgactgtcacttgaatttattgcaaagaaattattatcatcttagtgtctttgctctcaaagaggatgacaaagggcaagtatggatgggaacccgtgggaatggattatgtataggcgatagatggtatgtgcatcgggctgatgatgtgaattcacttgcacataatcatatttatgatatctatagggactaccgggatagaatgtggattggaactttcgggggaggactcgatttggctgtttatcagaaaaacgattttgtgtttcgtcattttttgaaggggagttttggagagcaagaggttcgtactattactgctgataggaatcattggatgtgggtaggaaccaataatggtatttatgtattccatccggattctttgttgaatgattcgcggcagtattacgtttataatttggataatgggaaaatacgtagcccttaattccgcaacactattacaaatataactttttaagtacctgagcaacaaaaagttgctcaggaatttgccatgtcagatttttcacctatcttagtgttgcaaatcaaaatatgtatcaaacccgacagacatggcaaaggtagcaattaaatccgagaaactcactccttttggaggaatattttcaataatggagcaatttgactccagactctcatctgtaatcgactcaaccctcggtatgagatgcaggctgtatggttatcaatacagcgaaatcatccgttcgcttatgagcgtttatttttgtggcggctcatgcatcgaggatgtcaccactcatctgatgtaccacctttcgcttcatccgacacttcgcacatgcagtgccgacacgattcttagagccataaaggaactgacccaggataacatttcctacacatccgacactggcaagacctacgacttcaacacggcagacaagctgaatacactgctcctcaattgcctattgtccacagggcagctgaaagagggcgaggggtatgacgttgacttcgaccaccagttcatagaggctgagaagtttgatgcgaagcctacatacaagaagttccttggttatcgccctggcgtggcggttattggcaacttgattgtcggcattgagaacagcgacggcaacacaaatgtccgtttccaccagaaggacacgctgaagaggttctttgaaaggtttgaacaaaacaagcttattatcaaccgtttcagagctgattgcggctcgtgttctgaagagatagtggaagagattgctaaacactgcaagaccttctatatccgtgctaaccgatgcagttcgctctacaatgacatctttgccctcagaggttggaagaaagtggaattgggcggcattgagtttgagctggcctccattctcatcgagaaatggaaagggaaggcataccgtcttgtgattcaaagacagaagcggatagacggcgaactcgacctgtgggaaggagaatacacctaccgctgcatccttacaaatgactacgagtcttccgagaaagagattgtcgaattctataacctccgtggagggaaggaacgcatcttcgatgatatgaataacggattcggctggaacaggcttccaaaatcctttatgggagaaaacacggtgtttcttctgcttatggcactcatacgcaacttctataaattcatcatggcgaggcttgacgtgaagaggttcggactcaaagcaacaagccgcatcaagacgtttgtctttaagttcatctctgtgccagccaaatgggtcaggacatcaaggaagtatgtgctgaatatctattcatgcaacaatgcttatgccaatgtgttccagaatgactttggataacaccgacaacttatagtcgtgattttgcgtattgcctcaagtcgcatggtggggtaaggggcatttatatgtctttatggtgacattcgatgcactgtgccccctttttactaacgatgcagattcttttcgcttctgtatcatattaggcgcgtagttgcggatttgagggtagcaatgaaattcgtaatattttttgtgacagcaaaggtcgtatgtggattggaaccaccggtaaaggcttttctgtctgccagtcaagacaaacttatgatcagttggaattccggcattatgatgaggatgacgggttggtaaataatgtagtccagtctatagtggaggatagagatggaaaaatctggctgggtaccgaatatggaatgtcccggtttgatccggatacggaggtttttgatagtttctttttttcagcgataatgcccggcaatgtctatttggagagtagtgcctgtgttatgaaaaacggacatttgctgtttggaacgaatcatggtttggttgtggtcgatcctgaaaaagtcatgccacagcatgtcgtttctccggtggttctcactgatttaaaaataaatggaatttctgttcgtcccggggatattgattctcctttgacagaggcattaagttatacaaatagaatagaattgaaatattatcagaattcattcagtatagatttctctacttttgactattctatggcaaatgatgccaagtatatttataagttaattccatacgataaagattggggagtcccttcctccttgaattttgcagcttataaaaatttgttgccgggtacttatcagttacatgtaaaagcatccagtgcttccggtgtatggggggaagatgaaaccgtattacagattgttattactccgcctttttggaaaacaggttgggcctttgccatttatataatgctgatttgtatggcaatgtatatgacattcagactaatccataagtttgctatcttgcggaatcgtattcaattagaaaaacagttgacagaatataagttggtcttttttaccaatatctctcatgagtttcgtaccccgttgacgttgatccaaggagccttggaaaaaatagaggctatgggtaggggttctaaagaattggcttatcctataaaagtgatggatagaagcacgcagcggatgctcagattaattaatcaattgctggaattcagaaaaatgcagaataataaactggttctttcattagaagaaacagatgttatcgtttttctttacgatatatttctgagttttagggaaacggcggaatctaaagaaatggaatttaaatttattccttctgtcagttcttatcctatgtttgttgataaaggtaaactggataagatagtctataatcttctgtccaatgcatttaagtacacaccggagggcgggaaaatagtttgttcggtagatgtggaagaagaaacaaaaaaattgatcatttccgtgtcagacaccggtattggtattcctttggagaaacgcgggcaacttttttctcgatttatgcaaagtagtttctctggtgatagtatgggaatcgggttgcatttgactcacgaacttgtaaatgtgcataaaggaagcattgaatatgcggagaatgaaggacagggttctgtttttacagtcactttgccattggatagttctgtatatgagtcaaaagattttttgatctctacagccttaatggaagaaacggatcatacagacgaaggcattccgtgccgtctcgtaaaagaagaacagatggcggctcctttaaacaagaaaaagatattgatcattgaagatgatactgatattcgtgaatttttgaagaaagaaatatctgtttattttgaggtggtagccgaggctgatggtgtggcgggttttgaacgtgcacggacttatgatgctgatctgataatatgtgatgtcctaatgccgggaatgaatgggtatgaagtaacccgtaagttaaaaaatgaatttagtaccagtcatattccgatcattctgctgacagcaatgggaactaccgaaaataaattggaaggagtagaaagtggggcggatgcgtatgtaaccaaaccgttcagcttaaaattgcttttggcacggatggttcaattgattgaccagcgtgaaaagttacgtgagaaatatgtgaatgatcccagtatagagcgaccggctatttatacttctgataaagataaacagttccttgataaattgcaagctattatagagcaggagttgggaaattcggaatttacgatggaagactttgctgcccggatgaaattggggcgtactgtattctctaaaaaagttcgtggtttgacagggcatactcctaatgaatatttccgtattattcgtctgaagaaagcggcggaattattgttggaaggtaattataatgtgagcgaagtttcttataaagtaggtatcagtgatccgctttattttagccgttgtttcaagacacactatggcgtgtctccttctgtttatctgcgtggaaaagagaaagaaatatagagtgggcaacctttattgtataatcgggcggtaaatatcagttcgtttcttaaaaagcttaaagtgtataaatttccatgttaatgaacaaaaatacattttggggctttataaataacgatatatttgtaaaatactgcttgaatatttcagattgaaagaaataagatactcattttaaatttaagaccatgaaagaactaaagatgtacatcgatggacgattcatcgaaaaccaatccgataagtggattgatgtattgaacccttctacggaagaagtgatatctaaaatgcctgatggcacaccggaagatgcacgcgcagctataaatgccgccgtgaaggcacagctttcttgggaaagtcttacttctattgaacgcgccggctatttaactcggattgcacaaggtatccgcaagcgggaacaggaattgactgatattatcatccgggagggtggaaaaacaagaggattagctaatgtagaggtgttatttacggctgattatcttgattatatagccggatgggcccgtcgttatgaaggggaaatcattcctagtgaccgtcctcacgaaaatatatttgtctttaagaaacctattggggtgacaacaggcatcctgccttggaattttccttttttcttgattgcccgtaaggccgctcctgctctgttgacggggaatacaattgtggtaaagccgagtcagctgacaccggaaaatgcatatgttttcgcacagattgtagatgaagttgggttgcctaaaggtgtattcaatctagtaaacggtcgtggttcggtgataggacatgaactggctgctaaccctaaagtaggtatggttagtctgaccggaagtgtggaggctggaatacaaaccatggcagccgcttctgccaatgtgacgaaggtttctttggaattgggggggaaggctcccggtattgtaatgccggatgcagatttggatttagctgtaaaatccattattgcttcgcgtgttattaatacaggacaggtatgtaattgttgtgagcgtgtgtatgtacattctagtgtaaaagaggctttccttgagaaactgttggcaggattcaagcaggtgaaagtgggggatccgaatcagtatacagacctcgatatgggtccgttgattgatgccaaagcactgaaatcagtagaagagaaagtgaaaaaagctattgagcagggagctgagttgctatgcggtggtcatcgtatcggtactaaaggatatttctttgaaccgacgattttgattaattgtacccaaaagatggatattattcaggaagaaacttttggaccggtacttccggttgttgagtttacagaggtggaagacgccattgcttgggctaatgattgtgaatatgggctgacttcttctatttatactcagaatctggatatggcatttaaattgattcgtgcgttgaaatttggtgaaacttatgtgaatcgtgagaattttgaagctatgcagggattccatgccggatggcgtaaatctggtatcggtggcgcggatggtaaacatggtctggaagagtatttgcagacgcagctggtttatttggagactaaagggtaattcttataattattctatgtaggattatctcgggatataattcgtattttatgtctcgagatacatcttgttatatgatggatatttattattgatttggattgatactttaagaagtatagagtacaaaatacttgttgtttcgtcctgttggaaaaggtttattcatcataaaacagcatgctatgaaattatttttttctttcgtatttgccttattggcttttactacttgtacaaaacctgacaaggaagtctatatcttcacttctcatcgtgagccggcattggacgggttacattatctttacagctatgacggttatcattgggatagtattgcaggttcatggctgaaaccggaaataggaaacaagaccccttattataattatttcactaaacagaccgaagaacagaaatatgctcccaattcgatgatgcgtgatccgtccattacccaaggtccggatggaacctttcatttggtgtggaccatcagttggaatggggaacaaggatttggttatgccagttctaaagacttgattcattggagcgaacaacgtgaaatcaaagtgatgaaagactctttgactaacaatgtgtgggcaccggaagttttctatgatgatgaaaagggacagttcatcgttgcctggtcctctgccattccagtagagagatatacggcagccgatagtttgggagctaataaaagtcaccgtgcctattataccacgaccaaggatttccaaacgtttgctccggcaaaggcattttatgatcccggatttaattctattgacggatttatagtaaagcgtgataaaaatgactatgtattaattataaaagacaatcgtaagcctggttacagtgatctgttctgtgtgtccggaccatcggcggaagggccttatactagtccgtcaacgaaatttgcaccgacttattccgagggaccgtgtgccgtgaaagtaggtgatgaatggttgatttattttgatgtttatcgggaaggtcggtttggagccgtagcgacaaaggattttaagacctttactcctatagacaatcagatttctattccgcaaggacataagcatggtactattataaaagttcctgaatcagttttgctgaacctgaaagcggaggaagctaaaagattccctcaaaaagactagttattaccctgaattgtttacttgaataagttactttgggctttgaaatttatataataaatgcgcaaatgaaaaacaagaatctggtattatttgttcttctccttttgttggggggagaattgacttcggcgtcagcccaaggaaagtccgggatctataaaccttggagccatggacgactgaaagtaagtaaagaaaatcgttatctgatgaatgcggacggaactccttttttctggttgggggatacaggatggctgttgcccgagaaactgaacagggatgaagttgcttattatctggaacattgtcgtcaggcaggatttaatgtggtacaagtacagactataaatggagtccctgctatgaatttctatggtcagtattccatgatagatggctttaactttaagaatatagacagaaaaggagtttatggatattgggaccacatggactatattattcagaaagctgagcagaacggtatttatatagcgatggtatgtatttggggaggtttggtacgctccggaaagatgaatgtcgaagaggccaaggcgtatggtaaatttttaggtgaacgatataaagatgctcctaatatcatttgggtaatcggtggagatacatacgccgaccgggataccgagatttgggaagccttggcaaacagcattcttgctgtggacaagaatcatataatgacttttcatccgtttggccgtacatctagtgctgcacatctgaataataaggagtggatggatatgaatatgttccaaagtgggcacagacgctatggtcagaaaaaaggagatggtgatacttctgtaaccggattggaggaggacaattggcgctatgtagaagatgctttgtctatgactccattgaagcctgttttggatgcagaacccagttatgaaggtattcctcagggattgcatgatcctgcccagccactctggcgtgactgtgatgtaagacgctatgggtattggtctgtttttgcgggttcttgcggacatacgtacggacataacaatatcatgcagttcttgaaaccgggtacaccgggtggatatggggctgatggaatagagaaaccttggtataaggcgatgcaggatcccggcttcaatcagatgaaatatctgaagaatctgatgttaactttcccttattttgaacgtgtaccagatcaaagtgtgattgccggtacgaatgggaatcgttatgatagagccattgctactcgcggaaaggattatttgttagtatacaattattccggaaacccgatgtctgttgacttgactaaaatcagtggcgcaaaaaagaaagtatggtggtatagccctaaggatggaaaactttcttttataggggaatttgatagtaaaattactccttttatctatgatggcagttataaccgagataatgatcaggtattgattgctgtagattcaaataagaattatatttctaccaaatggttcgaacttcccatggtaaatcaatagtgttttgaggaatacagccaaaaagtcttattaagtcttaatgaaacgggaaaagtcaatgcggaaattgtaattttgaaaaaacacatttacaaatgaaacgcattggctttttcttattcttttgcattctttccttgtatggtctggcacaagctgaaaatgacaaggatacgctcatcatccgacaagataaaatcaatgaatttatcaatgagatgaatgaggttgataaaagtatggattttataaacgaacctcctacattgacacctcccgttttatctgatacgctgcggatgccaaaatttgatttaactcctcgtgaagaaatgcctaaaatatctccctatactttttccgggaatcctttcggccatgattatatagatggacgtgcttatcagattaataatacagggattctgagtggttatcattcatttcaaggattgccttctataggcgaggcacgcaatgtcggggtgatgtatacccagcggctcaatgattttataaccgtgacaggaggagtatatgctgctaaatacaatgtatatggagtccgctttaatgatttcggtggtaagggaaaattgtcttttcgcattaatgacaggatgaaaattaatatgttcggcacatattctgtgtataatggatacggcatgactccagcctctcagctttttatgaatcaaaattcatacggaggtactttggaattcaaaatatcggatagtttcggtattgaagcgggggcagagagggaatttaatccgatgacccgcaaatgggaaacccatcctattattatgccggtattctataaatgataaattgtgtatctttacggcatgaatgaagaaatagcagagtattacgaagaattatacaggctttatatagatgagaaccagccattagaacgccgttacagacaattgcgtgaatcattggagcgtgtggtgcgtgaacggatacaagggaatagtttgcagaccactgatttggccgcccgtattaattatgtagccactcaatatgaactggatataaaagagcagaaccagttacatacatttcgtttgacttccaatgatattttgaatcatcgtaagtttcctgccaaagaagagtttctacgtgatttacgtgcagtggcttttgcgtataggaagatgtttgcacaagatattcctttgaaattattctcggttcttcctaaacaagaaataacatctttagggaaaaaagaaaagaaggaatacatccgtcgtatacgggtatgctttgattatgccgatgatacctatctgtatgtacatcctgtagatataatagctgatgaacctattcgggttgtttataataaacccggtataaaccatgaatttgaagaaactataaaggaactttggcgatatgcccagcttaatcttttggatgtttttgtagatagggaaggaatttataccccttcttttatcgtattggagccggattatctaatagatatcagttcactggcagaatgctacaaggattatggcagccatccggcaaattactttttaagccggttggttccgattgataacgcccggcctttgctgctgggaaatatagccaatctttttctggatgaatggatacatgcaggtgaggaggaaccggactatatagactgtatgaagaaggcgttccggcagtatcccatcgaactggctgcttgtgccgaacttcgtgacccgtccaaagagaaagagtttgccaaggattgccggatgcactttgagcatatacgggatatcgtgcagcatacttttctggaacctggttataacttggataaaaaggatgctgttctggaaccgtcttatatttgtgaggcattgggtattcagggacgtttggactatatgcagcgggatatgagcagttttatcgaaatgaaatcgggaaaagcagatgaattctccatacagggaaaagtggaacccaaggaaaacaacaaggttcagatgctgctatatatggcggtactggaatacagcatgggacaggatcggcggcgtatgcatccctatttgctttatacccgttatcctttattataccctgccagagcatcgtgggctcaggtaaggcgggttatcaatctgcgcaaccgtattgttgctgccgagtatggggtacaattccataatcattctgattttacacgaaatttgttagcgcaaattaatccggaggtaatgaatgaaagaaagttgcgtggaaaattctgggaacagtatctgaagccttctatctcacgtttccgagaaaaactgtcggcattggaacctttggagcaggcctatttctatacgctttataatttcattacaaaagaactttatacctccaaatcgggggatgtggattatgaaggacgtgcaggggcttcagctctttggctgagtacactggatgagaaacgtgaggcaggggaaatattatatgatttgcagatcattgagaataaggcgtcacaggttcataaggcttatatactcttgtccattccgcaatatgacgaaatgtttcttcctaatttccgtacaggagatgtggttgtattgtatgagcgtaatcatgattcggataatgtgaccaataaaatggtttttaagggtaacatcgagcagattacagatacagaattgcgtattcggctacgtgccacacagcgtaatgtttcggtctttcctccggacagccgttatgctgtagaacatgatacgatggatactacatttcgcagtatgtatttgggactttctgcttttctggatgcgaatacggaaagacgggagttgttgctgggacaacgttccccccgctttgattcgtcttttgatgaagctatagcgcaggccggtgatgattttgagagagtggcgttgaaagcgcaagcggcccgtgattactttcttctggtgggacctcccggaacaggaaagacttcaagagcgttgcgtagaatggtggaacatttttatgcaacatcatctatgcagatattgttactagcttataccaaccgggctgtggatgaaatatgtcagtcactttcttctataacctccggtatagattatatacgggtgggaagtgaactttcctgtgatgtacgttttagaggacatctgttggagaatatattggcggaatgtaacagcaggcgggaggtgaatacccgtatgacagattgcagagtgtatgttggaaccgtggcctctattgcggctaaggctgaactttttaaattaaaacgttttgatgtagccatagtggatgaggctacccaaatattggaaccccaattgttgggtattctgtgtgccaagtttgccgatgaaagaaatgcagtcggtaaatttattctgataggtgatcataaacagttacctgccgttattttgcagaatagcggacattctgaagtgcatgatgagggactgaggaaagtcggactttttaatttaaaagattctctgtttgagcggctttatcgttttcgtttaaaagaagaatctcctaaagcgatagatatgctttgccgtcaggggcgtatgcatccgggagtggctttttttcccaataaagcattttatgctggaagattggaagctttgggactacctcatcagttggaacacatagaggctccagtacgttttattccttcggaacaggatttggagagcatttccggaaagacaaaccaatatgaggcacggattgttgccggtttggccagagaggtgtatctggcttatgaagaggaatttgatccgaatcgaacgttagggatcattactccttatcgaagtcagattgctttgatacgtaaagagcttcagacattggctattcctgctctgagtaggatttccattgacacggtagaacggtatcagggcagcgaacgtgatgttattatttattctttttgtgtgaatcacctctatcaattaaggtttctgcccaacctgacagaagaagacggcgtacagattgaccgtaagctgaatgtcgctttaacgcgtgcacgcaagcaactttttatcacaggagtccctgaaatattaaatcataattctatctatcaacatcttctgaaaactatttattagggaaaacacaccacagactacttagatgtgtagtctgtggtgaattctttaattaggcatcaaccggtttgtatttgggaaccaatgctttcatgataatccaaccaactaaataagctacggcacatacacagaatatgatgaagtagccggcaggtttcccttcgaatcccataaaagtcatattcgtttctgctgcatagtcaaacagtctgcctgatcccatattaatgcagaatgaacctataccacctgccataccaccaatacctacgatagtagcgatggtgcttttggggaacatatcgcctactacagagtaaatattagcagaccatgattggtgtgccgcacctgcaataccgatgataatgataggataccaatatgaataattgcctaaaggttgggcaaacagtgccagcaatgggaacaaggcaaagataagcatagcctgcatacgggctgcatacggattcttaccagttttgttaatgataatagtaggtaacttaccaccataaatagataacatggtgatagcgtataatacgaaaatcaacatttgtgcagtacctgtgtctgaggcgaaaccatatacatccgaaatatatgccggagtccagaaaaggaagaaccaccatacgccgtcagtcatgaatttaccgacaaatacagcccatgtttggggaaatttgaaacattgcaagaatgaaatcttcttgttgtcaaagtcgttggcggcagcttgttgtgctttagattcttcaggattgttgttgtcttgttcaatatattccaattcggcagcattcacgcgagggttgacattgggtttcttgtagaggaacatccaaagtcccatccagatgaaacctaagccaccgataacgatgaaagccatttcccatccattacccacaccaatgctttgaaaataacgcgccaagggaggaatagtgatcggagcagctaacgcgcctactgtagagccggcattgaagatggaagtggagtatgcacggtcctttttcgggaaatattcggctgtcaccttaatagctgccgggaagtttcctgcttcacctacacccaatacaattcgggcagcaataaagtaataaacgctggtaatggcgatagttgaagcgacagctcctgttgcagaaagcatttcttctgcattatgaatacctaatgtctcttcggtagcccagccgcacaatgcatggagacaagctcctaaagaccagacgaagatagcccaaagataaccttttttagtccccatccaatcgatgaaacgaccggcgaacaggttggcgatagcatatactatagaaaaaatagctgtgatatctccgtaattcgaatccgtccagtgaaattccggagcaatgaagtctttccaggttagtgaaagcacctgacgatcgaggtaattgactgtagtggcaaagaatagcagaccacagattatccatctgaagtttgtcatcttctcacctactttttgaaatgtactcatgataatagatttaattatgtttttcttattagacgcaaaaataaccattctgtacctattctctatgcaaaaattggtggaaagcctgtataaatcggtacaatggtaagatttctaaaaaaacattccgaatgtcgcaaaaaacctaaaaacgggttgatttcttgcaacattcagaatgacaagagttaatgagtaatggtgtgtaccattctacttatctcatatctgtgtattttatttcatccttgtcactgtatttcaggttttcacctcccataccccaaataaaggtatagttgctggtacctgcagcggcgtggatagaccattccggagaagtaatggcttgttcattatgtaaccataccagacgttcttcttgcggttcgcccatcaggtggcaaatggcatttccttcaggcaggttgaaatagaagtaggcttccatacgacgggtatgtgtatgggccggcatggtgttccatacagaacccggagccagttcggtaagtcccatctgcaattgatttgtaccaccgttttttactctttccagcacatcctttacaattaattggtttacaatacggtcgttgctgtcttccatttttccataatgatctgaaatggccaaagcatattgtttaggatttgctttttgaagtttagcgtcagtagtgatcaattgagtaacgtatggtttgtaagccggtgccgaattgatatagaatttggccggtttggtagcgtcattacttttgaaagtaacctctttatttccgcaacctacatatagtgcttccttgtatttcataggatattctttaccgtctacagtaaccacaccatcaccccctacattgatgacccctagttcacgtcgttcaaggaagtaagtgatttccggacccagttcgcggaaagtttctaactttagtattttgtttactggcatagctcctccgtagataagacggtcataaagggtgtatgtaacattgatttcatccggtgccatcaccttttccatcataaatgagctacgaagacgttctgtatcatagtgtttcacatcttgcggatggcaagcggtctgtactttgtaatttacttgagctgaagctgccaaagcagaaacactcagcatcattgcaattgctaattttttcataatcgttatctttaaattttaatttttcattgttttctggtatttaatgatggaacgacggttcagcaccattaagaatagtgttatcagtactaaaattccggaaccaatccatttgaatgaataagtcaaatggaaaatagcccatgagaaaggacttgaagcaaagtccaacgctcccccttcaaaacccgacggaatatttacggcggcatcttgtgtcttggcatatacgtcatgtgccgctttggtaaagtaaggtgccagatcagttacaaaatacagaccgatggtcagcacaacaaaaccaatgatgaaggtttttaccacatttccttttgtgataggtaataccaacgggaatacgtagaacataccggctaacgaggccaatggcaggaattcattacccggaagtacaactgccaataaaatagtaacagggattaatagcaatgatacaactaatgtggccggatgtccgataaccaaggcagggctcataccgatattcaagcctacagcacctttaaacttcttggcgatcagttcgcgggtagcgtccgaaatgggtttcaatccttcgatgaataggctggtaatacggggaatcaactccattactgctcccatcttgatacctaaacctagaatataaggaatcttgtctactatttcttgtccgtttttacaagataatgcaccgatgccacatcctaccaggatacccaggaagagaggttcgcctagcaaaccaaatttctttttcataccttccgcatcaatattcagtttttcaaatccgggtattttgtccaataccttatttataataagagcgaatggcacaaaacctgcacagaaaggttgtggaatagaaattccttccatcttatcatagaaaccttggaacttgtctgctgtgtaatctgctaagattaatgtgatgatataacagataacagccgcgaagaagccccacaaaatactatctgtcgcaaaataaactacggctccgatgaaagcaaaatgccaatagttccataaatcgatattgactgtacgggtggtcttggtcaatagcatcagaatattgacagccagacaaaccggaataatgaatgcccctacggaagtgttataagccacggctgcggcagcaggccatcccatatcgaatactttcagttgcaggccatatatttcgaccaccttgcttaaggccggtcccaggctgctggtcagaagtgcggtaaccactgataaaccaacgaaaccaacacctaccaacagaccgctttttaatgctttgctgaatttgattccgatacaaacgcctaagattgtaaaaattataggcatcatcaccgctgctcctaaaccgatgatataactaaaaacttgttccattctcttgtgaattaatagtaaatgactgtgttttctacaatagtataaattaaaaactgccccaaaaataaaaccttttctcaacttatcaaacctgaaaggcataataattagtaaaaagacaatttttgaacgatttttatcgttatcgtgcacaaaaataaccgttttcgcacacgaataccaaataatacacttagtaggttgaaaagtgcacactgcttttcgagaaaaatactacttttgtttcataaaataaataggtctaatactaaaaataaacgtcttcatgaaaaagaattctatttgtaaaattattgtgtccggtttgcttacggctgttcctttgatgggcatggctcagcaggtttgtggtaataagccttggtctgtacgtatggcggaatcagagatggtgcgttgtcccgaatcctggcaattggattttcagacccgtttgaagtgggattactgtcatggcctggaacttcaagctatgctggatgtatatgatgcatacggtgataagaagttttttgattatgctgtggcttatgctgatacaatgattcatcaggatggctctatcgaaacttataaactggaggaatataatattgaccgtctgaattccggaaagatgcttttccgtatttacgagcagactaaggacgagaaatacaagaaagcattggatttgttgcgcagtcagttggatacgcatcctcgtaatgccgatggcggtttttggcacaagaagatttatgagaatcagatgtggctggatgggctttatatggggcagccgttctatgcggagtatgcttaccgtaacaaccgtgtgaatgattatgctgatattatcaatcagtttgttacagtggctcgtcataattatgatccgaagactgatttataccgccatgcatgtgatgtgagcaagcgtgaaaagtgggcggataaaactaccggattgtcacaacattgttggggacgcgccatgggatggtatgcaatggcttgtgtggatgtacttgattttataccggaacacgaagccggacgtgaatctgttatcgaaatattgaataaactggttgcccagattaaacgtactcaagatcctgcaacaggggtatggtatcaggtgattgacagaagtggggatgaggggaattatctggaatcctcttgttctaccatgtttgtatatactctgttgaaagcgttacgtaagggatatatttgtccttcgtacatggaagtggctaaaaaggggtatgaagggcttttgacccagtttatagaagtggacaataaaggggtagtttctatcactaagggttgtgctgtcgcgggtttgggaggtaagccagtgtatcgtaccggagattataattattatataactgaaaaaatacgttctaatgatgcgaaggcagtaggtccgttcattatggccagtctggaatgggaacgtttgtttcagaaaaacaattgtggaactgcatgtaaataatagggggtgatacgatgaggaaagttttaggattattgttgctgttggttgctgttagtggaacatgggctcaggaacgtcaggatacaattgtagtttcacgcgatggaacggggaattttcgtactttgcaggaggctatagagagtgcgcgggctttcatggattatactgttacgatctatgtgaggaacggagtatataaggagaaagtgattgttccttcatgggtggaaaatatagatattataggtgaagatcgtgataagacgattattacttatgatgatcatgcgaatataaataaaatgggtactttccgcacttatacggtgaaggtagagggtagtgatatcacttttaaaaatttgactattgagaataatgcggctcagttgggacaggcggtagctttacatacggaaggtgaccgtttgaaatttatcaattgtcgtatcttgggtaatcaggacactatttataccggtgctaaatttacccgtctttattttaaagattgttatattgatggtactactgactttattttcggtccttccaccgctttatttgaagattgtattattcacagtaaacgcaattcgtatgtaacggctgcttctactccgaaagaggctaaatatggatatgtctttaagcactgtaagctgacggcagaaccgggagttgataaagtgtatttaggtcgtccttggcgtccatatgcttataccttatttatagaatgtgagttggggaaacatattgtttctgccggatggcacaattggggcaagcagtctaatgaagaaacagcccgttatatggaatataaaaataccggtgagggcgcaaatgcttcggaaagggtggcatggagcaaacagttaacaaagaaagaagctgaggcggtgacggtcgatgctatttttcgtactcaaagtaattggaacccaatagactagattgattttgtaattgcttgaaaaggagacttctacgttggtggaggtctcctttttttgttgtgttgaataattggaacccgtgaaaaatacctaataaatccacataaaaagataaaaactacacatcaaggtaacgttatatacgtaattttgcaacagtgaaactaaggtcaaaaccttaaaaaaacattttaataactataaaaacacatcttatgaatctaaaagaattagctagaaaagctatctcaactctctttttgagtatgctttgtttggttgcttttgctcaaaccgcaacaggtttggtgaaagacaagacaggcgaacccatgattggtgtgaatgtattggtaaagggaacaaccaatggtacaatcacggatttcgatggtaagttttcaattccggatgttccgagtaatgctactttagtggtttcctatattgggtatcttaccaaagaggtaaaatctggaaaagatttggtcattgtattggaagaagataacaagactttggatgaagtcgttgttattggttatggtacggtgaaaagacgtgatttgactggttctgtcgcttctgttaccggggaaaaattagcggctaatccggttgccaatgtcgcacaggctttacaaggacaattgcctggtgtgagtgtgacttctcaagacggtcgtccgggtgcaggtatgtctattcgcattcgtggaggtggttctattactcagtctaatgatcccttgtttattgtagatggtgttcaagttagtggaattgatgatattcctgctgacaatatcgaaagtattgatgtgttaaaagatgctgcttctacggctatttatggtgctcgtggtgctaacggtgtaatattggttactactaagggaggcaaggatggccgggtttctgtcaaatataatatgtattatcagatgaaggagaatccaaaattattggaaactatggatccttatgattatgtatataatacatgggcatatatgaagagtttgggagattcttatggtgatggagttgccagatattttggattaggatccaagtatggaaatcatttgaatgaatataaaaatatgaccactcataattatataaatgatttgatgcagactgcgtcttcttggaatcatgatgtatctttatctggtggtacagacaaaactaagttttattcatcagttaactatatggatgatgaaggtatccgtgtgaagtctggtttccaacgttggaatgcgaatttcaaattgacgcaaaaaattaataaaaagttaactgcggactttgatttgcgttatagtgaaatagaagttaatggatcaggttttggtaatgcaacctctgcttacacttatcgtcctgtggataatcctttgggtgatgcttcttttaccgctggatttggtcaaggtgatacaaatatggaagagactagtaatcctttgtattacttggatactgtagattatataaaaaacatgtaccgtatccgtgcaaaaggtgctttaacttggaatattattaaaggcttgacggcaaagacggaattatcgttaaatcgtaattggaaccaggaaaagacatgggatgcaggacagacagaaaaagataatagttctgctaaattgaagaagagtgatggttacggtgtgcgttgggcaactactttgaattatgaagtacaggggcttggagatgatcataatttgtctttcttggttggtaatgaagtcttggcttcaaagtcagattacactgaaatatatggtgtagggtatcctgaaggatttacaatggatgatgcgtttggtatgattaatatgactactccttcattgggacaagattattttaaaggtgagataggtactcctaatcatactttatcttggtttggtcgtgctaattattcttataaaggtaagtatcttttaacagctacattccgtgctgatggttcttctaaatttgcacctagtcatcagtgggggtatttcccggctgctgcggctgcatggagaatttcagatgaagcttttatggaaaatacaagagattggttggataatctaaaacttcgtgtatcgtatggtacttctggttctgataatattgatgcttctttatggagagaaacatggaaaacagaacaaattacagtggatggtgaaaaggtaaccacttatgtacctggtgatatgaaaggaaatcctgatttgaaatgggaaactactattagtcgtaatttaggtgttgattttggtttctttaataattgggttcgtggtagtttggactattattggaatacgacaaagaatattttaatgaaagtgccgattgatgcagcgtctggttatagctatcagttccaaaatgtaggtaaaacctcaaataagggaattgaattggctttaggctttgacattgttcgtggtaaagattttaatttaggtgtaaacttgacttataattataacaagaataatattgacgaactgatggacggagtcttggcagatacgagagctatgaatgattggggttcatctatggctaagcctgcttatgattatattatccgtgaggggcatcctgtaggtactatccaaggttttaaatctgaaggatattatacgattgatgattttacttatgcggatggtaaatacacgttgaaaccaggggttccggatattcaaggtattgtgaattatccggatggagttaaagtgctggctgcggatggacaaaccgctgtaccgggtatgcctaaatttgcagatacaacaggtgatggtgttgtggacgaggatgacaaaacgattatcggcgaagctatgccacaacatacaggtggttttacaattaacggtaattggaaggcaatcgatttctctgtaggctttacttatcagattggtggtgatgtgtataatgccaatgcaatgcactccttgatgggaaataaagacaattccgctggtcagaatcgtttgaagttcgtttctgaaactttcaaatattatgatgttgatacaaacggtgacttgatgctggtgaaagatcctacagctttggcggctcttaacgcgaatacaaattacagttctttcttctctgaatatggaatcgtaagttctaagtttattgaagatgcgtcttatttgcgtttgaatacattgacagtaggttatactttcccaaaaaattggatgaataagattggattacagaatgcacgtgtgtattttacaggaagtaacttgttctgtattgatgggtattctggtatagatccggatgtaaacacgaagactgatggtaaggatggttttcctacaccttattttgattaccagtcttatcctaaggctagaacttatacctttggtgttaatttaactttctaattaatggagatgaatcgtatgaaaaaaatagtatattcaacacttttctttgctggaatgtttttgactacagcatgtagtgattatttggaggttggctctccttctattgtagattcggattttgtcttttctaatccgacaacagcacgtgccgcattagacggtgcttatgaacagtggagggattgtgcgcagaataaggtttttggcgatggattgttttatgctgctgatattgccgggtctgatatagaacggcacccggagtctttctctaatcagttggggcgccattatccggaatgtctttatcaaaacggtacatatgcaagtagttatggattgacttcgtatttgaaggagaatgatatttatgctagcttgtatgcggttgtaagcaaagccaatgcggtgataacatccatggaaaatgcggaaaattttgaatcgatcatcaatggtggacaatcagagatggggcaaatgtatggtgaggcggtagctatgcgtgctacggcttatcgtgaactgtgtaaaaattttggagatgttccttacgttggcgtttatggtgttgtgcctaaaggtttggtttcccgtgattctatttatgatgtatgcattgaagatttgcagaaagtggaacctttgatgtacaccattggttctattcccggcattgctgctgccaataaaaattatttttctaaaacctatgtgcaggctttgattggaagaatgtgtttggatgcagctggatatcagactcgtcgtggcgatataaaacgtgtaaacggaaaaggggaaatcatgacatttgaaaccaaagggaaagaaaataatggagctacttatggacgtcgttctgactggcaagacttgtactcaatagctaaaaaatactacgaggctttgttggctgatccgggtaatgcacagtttcatttgactgatccacggggtgcctcggataaatccggacgtacttttaataatccgtaccagtatttctttgaacagatgcatatggatgatgctatttatgcggatgagtctatttatgaatatcccatgcagcaaggtggtggaaatgatggtcgcccctattctttcggtcgtccttcgtctggtggctcaaaggctgcgtatccatgtaagagctatggacagggacgtataaatcctgcttatttttatggagtctttgatccgaatgatatgcgtcgtgatgtgagcattactatgaccggcagtaatggtaaaggggttgagaagttaattccttttgttcccaactcaaaagctgaaggcggtggcttgacattgaataaatgggatgagaatcgtcaggctaatccatgggtggcagcacaacgtaaatcaggtatcaatggtccgtatatgcgtatgtctgaagtttatttgggctatgcggaagtatgtgcggcattaggtgatgtggttacaggtaaacaatatttaaaaacggttcgtgaacgttcgttcccgcaaggtttggctaacacagatgcttttattgcatcttttggtaatgacttagttcgtgcgattattgaagaacgagggtttgaatatgcaggtgaaggtgatcgtcgttggacattgattcgttctggttatcttccggaagatataaaaagaatcaaagatatgactaaagctatgatggatggtttggcaactaaaggttattatgagtttgaaaatggtaatattatttctgcttatatatggacaaaattagttgatgcaaaaactatatatggtcatcgtttgacagcacagtgtccgacagacaaggtcaatgatccggtgctttatccgggatggcgcggacaaaaggataattgggaagaaatgggattgaattatggaagttcgactcctgctaccaatttagcaataaaagggttgtttgaaatagtgtctgaagaagaggcagcatctcttgaaagccaaggatatgctaaagttaattggggtattgatttggttgattatagagatgaatatgataagtatctgttttgggattatgattacgtttcggctcctatctatttgtggccgtttactcctaatgtaatggctgccggtggctttacgaatggttatggctttaaacaggaataataattcattcgttaaacgaaaataaacgtatggggagagggcgtattgtaaatgctctctccttttttgtgtttcttaaaaatgtatttttaaacaagcattcctgttattatcgcattgacaatttgaacttaaggtttgctttcttaaagtttgtaatttctgctaccatagctgtaccattttaccgaatcacctatggatagggagatgtagggggcagcagagtaatcaaactttgttgtaggaagttacaataagaaaggcagaaatcttttttgtgataggtttgtttgtttgttgcaaaattgtgcacataaaagaccaatttttaccttattcttcttttatggcctgttacttttgtatcaagacatattttaatcagatacgaaatgaaattaaaggttttagtaagtacaatagttagcatcatgatatggccggcaagtattacggcacaaagtgaattgattccaatgatagaaatacctgcgggaaatttctatatgggaactttgggtggagatgaaaattatgatgaagcgcctatgcataaggtgcacatatctaaaccgtttaaaatgggactgaccgaagtgactaatgcgcaatatgaattgttctgccccgaacacaagtcgctgcgtggtaaaaatggtttttcaagtgaagatgacgaagcggtggtgttcgtaacttatcaagatgccgttgccttttgtgactggttgactcggaaagaaggaaaaacttatcgtctgcctaccgaagctgaatgggaatatgcgtgtaaggcaggtcgttactggaacttctatatggatgacaagcttcctgccgcctggcaaaagaatcaagtgataacggctactctaaaacccttgtctttgagagtggcacaaactcctcccaacgactggggcctatatgatatgtgtggaaatgtggaggagtggtgtttggactggtatggaccatatatagacaaggaacagactgatcctgtcggctattcggacggtatagcacgtgtgaccagaggaggtagtcataatacaccggtgaaatatctccgttcggcaaaccgtatggctatgttgccagaggataaacatgcaatgacgggctttcgggtggtacaggcagagtatccgcagaccgctccgctttctcagccaaaagatgagtatgttgtgtctcagataaaatgggattgggcctctcaatatatcacggaacctgtcttcactgctcctttggtttatgtgcatgaaccggatgcacatagtggaacgccttttttcaaacataatcatcagccggcattgacttggtgtgataatggagatttgttagctgtgtggttttctactaatgaagaaaaagggcgtgagatggtggtgctctcttcgcgtttgcgtgccggaagtagtgaatgggagaagccccgtatgttttatcagatagctgatcgtaacttgaccggaactgcattattgaatgaccatcaagggactctttatcatattaatggagtggaggcggccggacattggcagaatttgatgatgactttgcgtacaagtacagataatggacaaacttggagtaaacctcgtattattgctccagaacatacgagacgccatcaagtgatagccggaacctctattacaaaggaaggctggtttgttcaggcttgtgatgccggaccaggtggaagagacggggcggctgttcatatcagtaaggataaaggaaaaacttggacggatccatgggatggagcatctttgcctgattttaaagaagggggtacaggtaccactatcgctggaatccatgccggagtggtgcaattgaaggatggcagattgatggcattggggcgtaataatagtattcgtgataaagaaggacatctacgtatgcccatgagtgtgtctgatgatatgggtaagacttggcattattccgcttcggaatttccccccattgatggaggacaacggctggtattgatgcgtttgaatgaaggtcctattttactgatatcttttactgagcatccttatcgtactccgaaggaggagcgtggtatgatgtttattgataagtcaggaaagtcttttaaaggatatggcatgtatgctgctttgtcatacgatgaaggtaagacttggcctgtaaaacgtttgttgactgacggtacttatcgttttcttaatggtggagcttggactcagttttttgaaatggatgagggtcatgccgaacctcgtggttatttggctggaacacaaacacccgataatatgatccatttgataacaagtcgcttctattataaatttaatttagcttggttgaaaggaaacgaaagtattatatctcctcaatctttgtctgactaaaggacgtagaatgcatatatccaatactttgtattgccttactttcgttttctagttgtattgtttgttgtaaatgaaagtaatcgaaataaaataaagtaaaataatgcaaaatgatttttgttttccgaaaatatttctacttttgcaatgtgtgatttaagatattatgattatggcgcacgcttaaagagaacacaaaaagaattattaaatctaaaatgattatttgttaacccaggaaagtatggaaaatgttcagaaaacaaggcgtttgtttgcaagcgcatacggttgcaaagccagccgttcttttcttatttggggattgtcggccgcaatgtctataagtgttataccgatgatggctgagatttctgttggtgagaaaaactatgatactcaaattgttagccagacaaagactataaccggaaccattattgatgaaacaggtgaacctatgattggggtgtcggttttagttcaagggactactacaggggcagttacagatttggatggtaaatttacattggaagttcccgcaaacgctacattggtagtttcctatatcggatacaagactcaaaatgtaaaagtcggtagccaaaatacgtttgccattaagatggagagtgataatgaggtgcttgatgaagtggtagtaattggttatcagactattaaacgtaaggacttgactggttctgttgcttctgttagtggtaaaaccgtgtctgttatgcctgtttctaatgtagcacaggctatgcaaggtaaacttcctggtgtgaacattacctcacaagatggacgtcctgatgcggcaatttctattcgtgtgcgaggaggaggttccatttcgcaaagtaatgaacctttgattttagtagatggtgtaactgtgaattctttaaatgatattccgtctgatcaagtggaaagtattgatgtgctgaaagatgcttcttctacagctatctatggtgcgcgtggtgccaatggtgtaattcttgtgactacaaagggagcgaaagaaggaaaggtttcggtttcttataatggctatgttaaattcaatactccgactaaatacttggaaacattagatccttatgattatttgtcatttgtttggggaaatgccgccgccagtggcgatgcatatcgtttgccatttgaaaaattatatggtattggtgattatttgggtagtaatacagagggtatagaaagctatcgtaacaccaagaattataacatccaaaaagatgtgtataatagttctgtatcccataatcatgatttgtctgttagtggaggtactgaaaaaacaaaagtcttgtttgcgatgaactatatggatgagcaaggtatgaaacttaactcttatgcaaagcgtggaggtgtttcgttgaagattaatcagaaattacgtgataatttagatattaatctggatactcgttatagtgatatgcgtactatgggagatgaaggaacaactaatggttccggctcattgctttcatcttcttatcgttttcgtccgattgctactcgtgatattttgggggacttgaatgctttgcgtgaagggaatatggagatgtatggtcgtcagtctacctgggatacttatagtcctgtggctcgtatcggagattatgatccactatatattaaacaaagacttcgtggtactttatctttaaattggagattgtttgatggctttgcttatcatactgactttactttaaaccaatcatgggaacaagataagatttgggggggagctatttataataattatttggatgacgaaacaggagccaaactatatgcgggaaatgtggaatatacaaagcgtgacagttggggactgcgttggacgaatacaatcagttatgacttcaattttttacctaaacagcatcgtttgaatattctgttgggacatgaagttacagactccggaggtagtaaaatgtcaatttcagctagtcactttccctctaattttacaaaggataatgcatttgccatgattaaccaatatgatgcagatcatggaacaagtaaattttcttctggagtagatattcccggacgtattctctcattctttggtcgtgctaattatacattgatggatcgttatttgtttactgtgacattccgtgccgatggctcttctaagttttcccccgagcaccgttggggatattttcctgctgcggcttttggatggcgcctttctgaagaaactttcatggaagggacgaaagactggttagataacttgaaagtccgtttgtcttatggtacggtaggtaatgatggtatcagctcagatttatggtcacaaacgtggacttctgaaacagatttacgatatcaatatatactaaataaccagtattcatcttcttatgacctttcaacggaacaaatggcaaataaaaatctaaaatgggaaacaactattacacgtaattttggtttcgatttcggatttttaaagaaccgtttgtggggatctttggatttatattggaatacaacaaaggatttgctgatgttgacttcgcttccggggattaccggattcacatctacgtatgataacattggtcagactagtaataagggaattgagttttctttgtcaggtgtgatttttgaaaataaagattggaatattacggctggtatgaatataaatttcaataagggtaaggtcgataagttggcagaaaatgtaacaggtttatatggctctagttggtgtggcagtagcagtttcccgggtgaggattatattttacaggaaggcaaacctgtgggtatggtcagaggttttatatatgatggcttttatactacagatgactttaattatgtaaacggacaatatatattgaaagagggcgtggcagatttaggttcttttattaatcctgtacatggggtggaccgtccgtccggacaaaatgcctatccgggtcttccgaaatttagggatatggataatagtggcagcattgatgagaaagatgttaccattattggtgatatgaatcctgttcatacaggtggtttcaatatcaatacaacttataaaaattttgatttaggattgtattttaattggagttatggtaatgatgtgtataatgtgaataaaatcgcttccttgtacggcgcaaaagaaaagggagtatatgagaataaacttggttttatgaaagactcctataagatttatgacgtggtagatgggaaattagttcgtctcactactcctgagcaattaaatgcagctaatgtaaatgctaatttaccattaccttatagtgaaaatggggttacttccagtattgctattgaagatggttcttatttgcgtctgaacacgttgacattggggtattcattgcccgataaggttttgcataaggctggtttgagtaaattgcgtatttatggaacaatctataatttgtttaccttaaccggttactcaggtctggatcctgaagttagtgctaatacctctcagaataaggcgaaataccctacagtaggattggactggggtacttatcctagagcacgttcgtttgtggttggtttaaatcttgctttctaatcaaaaaaacaaatcattaaattaattattatgaataaattagcaacatatatatctgcattggcactatgctgttcctttgctcaatgtagtgattatctgaatacttcttcaccggagaacactggagatgagtttgtaacctcttctacttccgaaacttttaaaatcctgtcttggtgttatgctaattatcggcagaattgtattatgggagcttatcgttggaatgatcccattggctcagactctgaaatatatccggaaataggctctttaaataatgccaacgctagactattaccggaattgttaagtgtaaatgctggtggttcaggcttcaacgggctttatactacgattgcacgtgcatctaaggtagcggaattggtagctgataaacctgcatttcaagatgctgtggcagcaggaaaagtaaatgattggactcaactttatggtgaggctttaacaatgaaggctttctgctatttcgatttggtaaaacattatggtgatgtaccttatggatatgaaaataacaatgtggaagattattcattgacttcccgttttgaaatttatgataatcttattgagatattgaaggaggcagaagcattgatgtatccactgggagaaggtggcattactgctgaacgtttttccaaggggtttgctgacgcgttgttaggacagatagctctttattccggtggatatcagacaattcgtacggatgtgcccggtttgtatggtgacgtacagtttacgacaaaaggaaaagaagaactaggatgtgtctatgctcggcgcaatgattatctagattattataagattgccgagaagtattttcaggctgctttgaataataaagggacggctgctttagttacggttgatgaccggagttatgcgaataacccgtttcagcgtcattttcaatatactcatgatctggctctgagcccagaatctatttttgaagtaggtaatatacaagggggacaaagtgggcagactactaccagtgaatattcttatgcttttggacgtccgtccagtggtggtagtaatcaggctgcgccttgcaagtcgtttggggcgttacgtattattccctctttctattatggtgagtttgaagcaggtgatatgcgtagagatgctagtgtgactgttactggtagtaaaggtgatggcaatgaagctctgttgtcttttactccgggtagcaagttggatgggggaattgctattaataaatgggatgagaatcgtatgaatcctccttatactacatctcaacgtacttcgggaatgaattggccggtgttgaggcttgctgatcttattttgatgcaagcggaggtcaaagcggaattgggagcggaaggagaagcaatccaattacttaaccaaatccgtcaacgtgcatttggaaattctgaacatgccatttcagcttcgggtgaagtcttgaaggaagctattttgcaggagcgcaaattagaacttttaggtgaaggtactcgtcgctgggatttgattcgttctggtaagtttgtggaaaaagctttagctgttcgtgcagaaatgacggaaatggttaatgatttgcaaacaaaaggatatcatgaatttgctaatggtaatgtgatttcgaattatgtatatactaagaaagtgtatttaagttcaccgctgacttttgatccagatgagtcgaatccggctctgtatccgggatggagaggtcaatatgattatagcactactccggtaaaagttactggaacagaccataatctggctattgaggggctgtttaattatatagatcccgatggtgctgaagcaaagaaattgcttgacgagggttatacacaggatgattggggagtgacattggtgaaatatgctgatcattatacaaatagcaatttgttgccgggaataaaggaaggcaatgttcctcccagatattattggcctattccatttgaaacgctgagcaagtctaaaggcaagataacgaacggatatggcatggcacaagaataaagagtatatatgaaaaacattttatctatttgcacatttttattggcctttgggacgcttcctttatgggggcagtcccaagaccctttgaatgaggatcagactacagtacgcattcttgagggggataattcagacccttctattgtccgttatggaaaatcttattatctggttcattcttcctttgtttataccccgggactggtagtttacaaatcggatgatttagtaaactggactccgtgttctacagctttgactacttttacaggagatatctgggctccggatattgtggttcataacaatcgtttttatatctatttcccgaccttgaatggaaaagggagaaagaccaatatggtaacttgggctgatagtccggaaggtccgtggagcactccgatagatttgaaaataggaggtattgatccggagcatgtggttagtgaggatggaaaacgttatctgttgctcagttctggcgctttatatccgttgtcggatgacggatgctctattacaggagaaccggtcagaatttataaggaatgggaaataccggaggaatgggatatagaaggagtttccatggaaggtctgaatgtgaaaaaagtaggagagtactattatttatttgcggccgaaggggggacggcaggtcctcccaccagtcacatggtagtacaggcacgtagtaaaaatataatgggcccttgggagaatgctcctttcaatccgcttcttcgtacggaatcccgtaatgaaaaatggtggagtaaagggcatggctctattgttgatacggaagatggacggttatttatgattttccatgcttatgaaaacggattccagacattggggcgtcagacccttttacgtgaactggtccaaaaagaagatggatggttacatttgaaagaaggagccatttctttacctgcaccggaacgtttgaaattatctggtataaaagattttgtatggcagacgtgccgggaacataacttaaatgatcggttccggattactcctgataaaatcagtatagaggcaaaggggaatactccaaaagaaggatctcccttgttagcacgcaccagtgctcataaatatgaagtggaggcttgttttgaactgaaaggtgaaaatacatctgccggattggtggcttattatgatgagaattatcattttggatttggttttaatcataagcagatgcttcgttatcggcgtggacaagtaagccgtacggaatcaaaattacctcaagcaaaccaatgtggaaagatgtggttacgtttgcggaatgatgctaatgtattgtcggcctggtacagtgtcgatggtaaaaaatggcataagtatccatggggatttgagatatcgggagtacatcataatacggtatatggtttcttgtttgttcgcccaggtatttttgccggtggtgacgggcaggtggaagtaacagattttgttttgagaaatcttgattgatgcgttgtttaactggaatttaatgattgaattgcttatgaaatattgctgctcttttttattgttattgcttttggggatttccggtggatttgcccaagataaggtggagtgttggggacgttatgaaatctccctgcctgccaaagtaaaggggaacccttttgatattgagcttacggcaacgtttagcggaccggatactacattgactgtacgtggattctatgacggaaatgataccttcaaaattcgttttatgcctgtgaaccagggagtatggtcgtacgtgacgcagagtgagattccggtgctgaatgaggtgaaagggcggatagaatgtattgctccgggtaaaggaaatcatggcccagttaaagtggatggaacttataattttaaatatgctgacggaacgcgttattatccagttggaactacttcttatgattggatgcatgtggcaggtaaccagcctgatcagacagtgaaatcattggagctatccaagttcaataaaatcaggatgctgttttttgtgcaaaactttgatccggattatcctgaaccctccatgtttccttttgagataaagaagataacaaaggatgaaaagggaaaacctgtgtatgaatgggatttcacccgcttcaatcctgcttattttgctcatgtggaagcatgtgtggataaattggccggaataggagtagaggctgatttgattcttttccacccttatgatggtggccgttggggatttgacagaatgcctttggaagccggtgtccgatacttgaagtatctgacagcccgtatgagttcatttcgcaatatttggtggtcattggccaatgaatatgattttttgagagaattaaaaccggaatattgggatacttttacacatacggtagtagagaatgatccttattcccatttatgctccattcatacttatacagctaagtattataaatattgggaacctgaatacactcatgccagtatacaggaccaggcacctgtggagggatttggaagagcggctacggtgaaaaacatttataagaaaccgattatttttgatgaggtatgttatgagggtaatatggataaccgatggggaagcttgagcggtcaggaatacctttatcgcttgtggcaaggattgattgtggggacttacgtgactcatggagaatgttatatggatgatcctaaagattattctcgtgactttttggctgtgggaggaacttttcaaggggaatcctggaagcgcattggctttacaagacagattttggatgcactccctaatcctctacatttatgtgatagcagttgggacccttatacttcgactgccggagaaaattattatatgatttatctgggcaaggaaataaaaccggaatgggcatttgatttaccggtaaaaaacgctttttatccacgtttgaaagaaggagtacgttttaaagtggaagtcattgatacttggaacatgacgatagccgaatggcctgtcgtttttgaaacgactgctcctgtaaaggatagggtgtatgataaaaatcaaggaagagtaagactgcctgcaagtccttatctgctgctaaggataactgaagtagaataatttatgaatgtgttagtttgttaatatgctaattgccgtttggttccgctatgtttacatgtcaattggcctattagcaaattggcaaattagcacattattcaaaatttgcacataatagaccaatttttacctttctgtcctctgtttctcgtttaattttgtattagaacaaatcttaatctatacaaaatgaaacatttacattttcttgcttttgtcttgtgctggcttgtatggggacatctgttaaaagcacaaagtcttgataattatagttcgttagatccttcgcaacctatagaatttaaagggaactgccttcgttatgcagataaagaaattattttaggtccgaaaacattttttgttgatgggcagttgtccgatagggaagtggcgggtaatccttatgtttttaatagtttcaataaagctgccgctaatttctcagctggtacggaagcggaaccgatgaaagtttatttggctccttatgtctattggattgatgatccagatgaccctgctattcgtgttggtaaagacggccgtgaaccgttcggcttggttgttaaatgcccttatctccatattatcggattgaatactcatcctgaaaatacagtcctggcatccagacgtggacagacacagggggctgtcggtaatttcaccatgtttgatttttggggagacggtctgttagtaaaggacttgactatggggaatttctgtaatgtcgatttggaataccctctgaagaaggaattaagcaggaagaaaagaatgtctgccatcactcaggcacatgtcgcttattgtcatggcgacaagattgtggcggataatgtacatttcattagccgcttgaacatgaatccgttgaatggcgccaagcggatactttttaataaatgccacatggaaagtacggatgacgcattgaccggaacaggggtttatctggattgtacacttcatttttatggtcagaaacctttttggagaagtgatatgggcggagctgtatttttgaactgtgacttttatgtatgtcatgaggaagatcggcaatatttttgtaagtcggtcggaccattaagtattgtcgattgccgttatcattcgaagaagccggtttatgcgggctggacacatgatcccacagattggttgcgttgttaccaatacaatgtgaaacagaacgggcaaccttatgtaattggggctgacaagccttataatacggtttgcatggatcagctgaatcaactgaaagctttccggctggaagagaatgaagaggtagtttataatacttacaatttattgagaggagaggatgactgggatcctcttcgggtgaaagaccgtgttattgctataggtaagcgagatggaagggattatactcggatgccctcttgtctttctgtagagcccttaacggcttccatccaaacaggtggccggacggtcagattgactgcaacagtaaaaaggcattgtaactatgtactgaataatgttcccgtgaagtggaaagtacaacaaggttacgaaaaggaggtgaaattatccacttccgagggttatgaatgtgttgtcgaggcaactaatgtggaggatgaaacaaagcatttcactgtgatagcctatacagaagatggtttggaatgtgcgacagagcttacggttgctcccgattatgtgccggctccttcgtttacgaaaactccaaagatgaatatcactaaaggagtagctactgtcagttatgctttagaattgaatgggcgtaaagatgaatcattgataacttggtatagatgtacagacaaaaatggagccaatagacttccggtttctgtatctcgcttgaatgaaccggaatactcctatacgttggtaaaagaagatgtcggttattatctgatggcagcggttgctcccaaacacttgcgttgtgtgccggggaaagaacagattgttgtttccaactctccgataaagaaaggacaagtgaatattgctcatatatttgaaacggattttcagaactttccatgtaagaatcaaccacaacttttaccgggattttggacgattggtggatataagcctttggatacggcagcatacgattggcaggtagttccggataaggattattggatttatgggccgggaatgaatggttctcacggaaccggtttgttgcaagatcagaaaggagcccgtttgctgtatactccattggatggcagctatggagatatggcaataaccttgaatgtggatgccagtaaaacagcaggacaaggttttggtagtgcaacaggacagtatttggatttgtatatcaagtttgatacccgtactttaacgggatatgcattgcgtatcattcgtacgaccaagtatagtaatgcggttgattttattttgatgaaatatgagaacggggtggctgaggccatcactcaaccggtgtcttctacctgctatcgtacaaattgtactctgacattgactgctaaaggaggaaaattgacggcacacgcttcaacaacaactccgcttccggcgcctgtaacagatccgaacttgaaactttcggtagatttggaggcggatatagcctcgaacacttttgggggcaccggtatccagcatacgggcagttgtggtgaaagtacaacgatgctgcactatatgaaggtggaatgggaatagagtgattaaaacttgaatttaatactgatgaatctatggttacattaaaatcgtttttaggtatgattgccgcagttccttttataatggcgtgtaatcagacagggcaggtcaatgcaacactttttcctgcttccggttcggaaaatgtcaatccggacactcatttggttcttactttttccgatactcctgtccttggagattccggtatgatacgggtttatgacgcagttactgaccaagtggtggacagtttggatttgagtatcccacctggtcctacggagagccgtacgtatggtccggaatgtgattatacaaaagtgccttatgactatactcgtaccgttatgcctaccaataaagatactcgtccgggtactccttcgggaacggcggaacctactcctcctgtgtaccagcttactattatagggggatttacggatgcctttcatttttatcccgtcatcgtgcgtgattctatagctactatttatctacacaataatatgctggaatatgggcatacttactatgtgactatagataatggtgtgttaaatttagctgatggcagttttcaaggagtcactaaagaagatgagtgggttttcactactaaatctgacatgccggaactttcagatacattgattgtggatgttgcaggaaaaggagactttaatacagttcagggagccttggattttattcctgattttaatgaacaacagactgtgattttagttaatcccggtgattatgaagaattggtctatacaagaaataaatggcatgttaaaattaaaggagcaggaatggccgatactaaagtacattatgcaaataatgaagtctttaatcctcatccgctgactgtgaaaaccaatgagtggcccggtacatttccttcccgtcgggcggctttcatgcttgataattgcaaggatatagtcattgaggatatgaccattgctacagatttaaaaggtcaggcagaagggttgttgattaatggagaaaggattgctttataccgtgtacatattataggttcaggagatgcattgcaggcgaatggaacaatctatatggaatcttgtgagttggatggtggtggtgatactattttaggacgtggcagcttgtttgcttataaaagtaatttccgtaatggtggcggtcctttctcatgggtaagaaatacggcgggcaatcatggtaatgtgtttgttgaatgcactttttctacggaggatggtaaacaggcggattacggacgtactaaaagtaaccacggttcggcctatcctgatgcagagtttgtcttgatagattgtaaagtgaaaaatataattcctgaaggctggagttctattggagcgaagactgctaaaatgtacgagtataatacttgtgatatggtgacaggaaatccggttgatgtatccaaacgtcatccatattcccgccagctgacaaaagataaagatacagagctgattaacaattatcggaaccctgcttttgttttgaaaggctgggtgccggatagttgtataaatgggacgaagtaataattagtggagataagtttgcgcatcgaatattgaggtatctaattaaataccggaaacagatatggatgatctattaaagttggaaacagaaacttttaataaattatatactgattacaggttacggtttattcgttttgcgcaaacttatattcccgatatttctatagctgaagatattgtgatagacactttagcttattattgggaacatcgaagagatataaagaacgatgagaatatattaagttatcttttaacggctataaagcataaatgcttgaactatttaagacaggaacgctttcattatgaaaagaataattctttgtctgaacttgctttatgggaattggattttaagatatcagcattatcggcatgtgatccttgtgaattgtatactaatgaggtgcaagagattgtaaatcatacgcttgaaaaattgccatcaaaaactcgacagattttttttatgaacagatatgaagatatatcctaccctgaaatagctaaaaagttatttgtgaatcaaaaaaccgttgaatatcatataagtaaggcattaaaagctctacgtgctgtcctcaaagactatctttcttttttgatttatctaatttagcaaatttttttgtttttcgtttagggtatttccattctcatgtgcttatagagtaaataatggaaagaaaatgaatttattatcgttgtatcatttttttgcaggcaaagcatctgacaagcagaaagaagctattaaacgatgggctgaaagttcaccggataattatgagacattatgtcgtgaaaagaaaatatttgatgcaggtattttgttggtagataaaaaggaactgtctcaaaaagaaaatgccccgttgttatataagctaattaattataccgtaaagatagctgcggttgttcttttggttgttgtgtctgttactatttataagtatcaggaattggtgaaaaaatcagaggtattacaaaccatacttgttcctgccggtcaaagaataaacataattttacccgatagtacgtttgtgtgccttaattctaatacgaaatttagttatccttctgtttttgcaacaaataatcgtaaagtaaagttggatggagaagcttattttgaagtatcggccaataaaaataagccattttatgtacatacttcaaaaggagaaatcaaagtactcggtactcattttaatttggaagcttattctaacgctgatgtatttaagacttctttgtttgaaggcaaagttcgtgtcagagtaaaaggtaacaatatttatttgaaacctgatcaaatggtatgttatcataaaaatggaaaaattcatttggaaaccatccacgattatgaccagtaccgatggcgtgagggattaatttgtataaaaagcgcaaaatttaaggacatcatgaaaacttttactaaatattttggagatagcattgttgttcaaaataaagaggtggaacattataaatatacaggaaaatttagacaaagtagaggggttattaatgcgttaaggttattgcagaaagatgctccttttactatagagcaggatgaggacaaacaaattatttatatcaaatagagattcaaatacataaaacacaactatatttttttttaaactaaaatctaataacatggaaacaacttatttaaacgtatgtgataggtcaataagtcggtggtctattgtgagattactgaaaacagtcttgttgctattatgtgtgtcatttagttcagtgtacgtacaagcatcagatcggagcgaaggtatcactatttcatgtaagaatgaaagtttggaacaagtgatacacttgattgagagccagtcatcttatctttttgtgttaaatgataaggtgaatactaaacacaaagtaagtataaagatagagaatggaaatataaatgctattctgaataaaatctttcaaggtaccaatatgacgtatcaagttgatggagatcatattttaatttcaactactcataaaagtatcggtttggatgaaacacgacagactactatgataaaaggaaaaatagtagataatgcaggtgagcctatgattggagtaaatgtattggtaaaaggaacgactaatggtgccattactgattttgaaggtaattattctcttgctgatgtaaacgagaatgatgtattaatggtgacctatattggctatcttactcaggagataaaagtcgggaaacagtctgtcataaacattgtgatgaaagatgatactcaatctttggatgaagtggtagtggttggatatggtgttcaaaagaagagtgatttgactggttctatatcttctataaaaccagcggatattacatctactcctactaccaatgcgttgaaatctttgcaaggtaaagtagcgggattggatataacacaatctagcgggcagcccggagcctctatttcattaaccatgcgtggtaatcgttctcttaaagctgacaataatccgttagtattggtcgatggtatagattacggatcatttgttgatattaatcctactgatattgagtctattgaagtcttgaaagatatctcatctacagctatttatggaacgaaaggagctaatggtgtaattattattacaacaaaatccggagccaagggacaaaagacgaaaatcgattttaatgcttatgtttctattaaaaataaggctaaataccctcgtatgatgaatggagaagaatatgctcaattaaagagagaggcctatagaactactaattcagcagcgccggatcaatatatggatgatgctttgattttcaatgcagaagaattggagtatttggaaaaaggttattgggttgattggcaggatttattgttgggtaccggtattacccaaaattatgaaatcagtatgtctggtggtacggagaaaacatcttattcattatcatttggttttcaagatgataaaggattgttgaaaaatgatgtattgaaacgttataatggtcgtattagtcttgatcataagataaataaaattttcaatgtgggtgtgaatgtttcatatacttttaaagatcaggataagagacagaatccattgaatttggctaacaaaataccatgtataggcagagcttatgatgataatggtaattttatattaaaccctgctcctggaaatagttctgcattcagtcctttatgtgatgagcagccgggtgcttacgaggataatattcgtacgaaacgtatgtttgcttcggggtatttgaatgtgaatattctgaaagattttttctttaaatccactattggcattgatgttacagatagtcgggaaggtatttataaagataaaaatacagtagctaatcttggtgtaaaatctacctcttctgttcaggcggataacgattggcgttatacttgggagaatatactgaattactccaaaacatttgggaaacatggactaactgcaatgattggtagtagtaccactgcttatggatatgaaaaggttttggctagtggagctaaccaagcttctgctctgacttcattccacgatctgggagcaaatgctgattcaaaagaaaatgccagtcaattgattgagacgcaaatggtttctttctttggacgattgaattataagtttaatgaacgttatttattccaagcttctttgcgtgctgatggatcttccgttttggcgaaggggcacaagtgggggtatttcccgtcagcatccgctgcgtggcgtatttcagaagaaggctttatggctgatcaagatatttttagtaatttgaaattacgtttaagttggggagttgctggtaacagtgcaattgatgcttatgctactttaggaggacttaaaaaatcagtatatacatttggtagtagtgtttatggatattatcctagcgagattgcaaataaagatttgacttgggaaaaaacatcgacatggaatcttggactggatttctcaattttaagaaatcgcatatctggtacaattgatacttatatttcacaaacctcggatttgttacttccaagtttattgcctagttctactggatatgcatctgttatgcagaatataggtaaaacagaaaataaaggtattgaagtgacattgaatacaatttggtttcaaaataaaaattttagttggaatacggattggacatatagtttgaatcgtgaaaaaattaaagctttaaatagtggtgtaacgcgtgatgaaggtaatctttggtttgttggctctcctactcaagttttttatgattataaaaagattggtatctggcaattaggtgaggaagctcaggccaaagcttttggaggatttaagccaggggatattaaagtggcagatatgtcacctaaaggttctgaaggtgaaggcgttttctctacggatgaccgggttattttttcaagagttcctaagtatacgtttggtataactaataatatcacctataagaattttgatttaatgttctttatttatggtcgtatcggacaatatgtaaaagatgcctatactcagttatacaagccaagtgcgttggaaaatagcgcacctgtaaattattggacacctgagaatcctagcaatgagtatcctcgtcccaatagtggttattcaacgaacagctatttgttacagtcttcattggcattccgtaaagcttcttttgtgaaaatacgagatattacattgggatacacactgcctaaagaatggacatccaaaatgatggtgcagaagttgcgtatttattgttctttgaataacttcattaccttcacggatttcccgaattatgatccggaaagcaatggaagtatggactttccattggcgaagcaagtgttgtttggcatcaatcttagtttgtaatctttaattatgatcattatgaaaacaaaattttattattatataagcatattatttctttgtttatgtcatgtctcttgtgaagactttctagaagaaactaataaaagtggattgacaacggatccatttatgaaaacgaaagttggaatagagagtgcgttgaattcctgttattcgggtgcaaggacattttatggtcaggaagatggttttggtatgacagaatctggtactgatttgtttttgcgtgggggagataataaagcaaatcaattggctgattatactattgacttaaatggctcccaatcaactatcggaaatgtttggaaaaatctttatttgtcattaagtgcttgtaatcagactatttctttgttgccaagtgaagtattgaccgaagctgaaaataagtcatttgaaggccaggctaagttttggagagccttctatttgtggttgataacagaaacttggggagacgtggtattgaacacagaacctataacgggtgctgttactgaagcacaccgttcgtctgtagaagatttttataaagttatttttgatgatttagatgtggctgtcaatcaactggcaccaggcaaatcaacagatggtagaataactcaggatgtagctaaagcttttaaagcaagagcttgtttgaccagagcttgtgcaacgggcgaggcttcgctttatgctgaggccgctatgttggcaaaggatattatcaatagtcaacgctattctttctatactgattatagtgatatgtgggatattgccaattgtgatggaggtacaaacaaagaagcaattttttctataaattacaccaactcagaattagaaaataatgcttttgatgctactgctactaattcgggtaataaagggattgttgattttgtaatgaaatatgataaggaagccggaatggaacgcgatgtcttgaatgctcgtcctttccaaagatatatgccgtccaggtatttgctgcaattatataatgagaatatagatcagcgttataaagtgacgtttaaagatgcctggtacgcaaacaagaatccgttatctgagagtgatttaaaagtttatcctttaatggctacaggagatacggccatatatatcatgaaaacggctgctactgattcacaaaaagtatgggcgtcaaagcggtatcgtttgctggatgttaatgacgtgtacacttcggaaggtaaagctatcttaaggtcgcaatttgtagaaatgcataagtttgccgatcctacggcggtttataatcaggattggtgtcaacgggatgcatttgtcattcgtttgccggaaatgtattttattgcagccgaagcgatgctgcaaacgaataaacaggaagcagtggatttgatgaatgaatttttgatgaaacgtgcaataccaagtaaagaaaatgacatgagaattactgaatcggaactgactatcgattttattttagatgagagggctagggaattgtgtggagaacaaatacgttggtttgatttaaaacgaactaaaaagttagttgaatacgttaagttgcataatatggatgcaaaagataatattcaagaatatcatatgctacgtccgataccccaaaatcaattggatgcggtgactaataaagatgaattcactcaaaatcccggatatacaaaataaagtaattttgtaaaaggagtatattgaagtatttcttcttaacatactccttttacaatataccataaagaaaaatagaggtaaaatgaaatcagctataaaaaaaatattcgttttaacgggttgtatactattgcttgtaacatctatgagagcacagagggcatgtttcaatttatcagaaactctatggaatatcactcttgatcgttcggctgtatggcaaaatgattctctttacgttcctcctgtcaatattcatgacctccctgtccatatacctaccggaggctggaatttgcttgatacacccgataagataggggtgacacttcctgctaccgtagagcaacacctatggggatggaatggagaaacatttggagttaccggaaattatgtaggggtttcatggtttgatacaaaaataaatgtacctgctgattggagaaataaacggatagtgatgaatgttgcttctgtccgttttagagctgagatttttgttaataaaaaattggtgggatatgatttggtgaatagtacgccgtttgctgtagatgtgacaccttttattctacctggtcaggaaaatgtgattgctttccgcattactgatccaaatggtaattttaattggaaagattcccaagtctatacatggggagagtatagaactaatccttctcatggttttggcggtataactggaaaagtggagttggttgctacggataagttatatattggagatgtttttattaaaaaccaaccggaccctcattctattgaagttgaagtgacggcttgtaatgaaacaaagaacccgatgaaggctcagaaaatgcttttaacagtaaaagaacataaaggtgagaaagtactttaccgaaaagaatactctgttgaaaatcttgttgtcggagagaataaacaaacttttcatattcatttgccagcggcaaaattgtggagtacggattctcctcatctttatgatttgtctgtttcagtaggtacggataattatacgcagcgttttggattcagatggtttgaagtgaaggatattcatggagataagcaatttttcttgaatggaaaaagaattgttttacgtacagctatttcatggagtttctggccggataatgggatcactccatctgatgagttggctaggagacaagtggagagtgctaaaaagctaggacttaacatgttgaattttcaccgtactatcgggcatagcaatgtcttggattatgctgatgaattgggattattatactttgaagaaccgggaggcaatcagtatcctatcagtcactttaatgataataacaagcaaagcaagttttattttgcttaccggaatgaaaaattggtgcgaatgattaaacgtgaccgtaaccatccgtctcttgttatttataatttgcataatgaacggggagcttggccacaggtacaggattatgcgcagatgcgtatggcacattcgttggatcctacccgtatcttaacttataattccagtaatggagagaacccggaaaatgaggcgaatgcccgttttaaattgcacttgatgccaaacgatactactttttatgattatggatggtatgacaggcatcatgcaggtggtccgggttgctatcatgataatttatattggggtaaagataactatcaccgtttttcagatcataaggatgagattatttattggggggaagacggggctattggtactccgccgcgtcttcaactcattcgggatgaaatcctgcaatctggcactacttctggatgggaagcgatggattatatgaaatggtatgatgcatatgattcgtttcttaaacacaatggatttgccaaagcatttcctacagtggatgatttgacccgtgccatggggaatgtggctttctattatcaaggtagggtaattgagaatattcgtatcagtaatacggtggatgcttatgctgtaaatggttgggaaagtatgaaactggaaaatcactccggcattgttgataattatcgttatcctaaaggagatgtggaagtaatggctcgttataaccaaccgttatttttagctgtaaaaatgaatcggaaagtgctgaatgttggagatacgactatagtagatacttatattgtaaatgaaaagaatttgaaggggaattattctcttcaattgatagcgaaagatgcggaaggtactgtattggctacccatgtatctagtgtacatgttaaaggggggaatgtatatggtcaatgtttacagatcggctggaattttgttcctcgggcaacaggctatgtttgtattgaagcaaagttggtcaaaggcaaaaaaacttttgcaactggagacgattctttgtttgctgtaagtttgaatacgaaaggaattacagctaatggttctattgctgatactacgggcgttctgagcaattttatgaaaacagttggttttgatattccggaatataaagaagggacaccttcgggagattatttgttggttggcgcctttgaacctactcaatggggaagtggtatgagtgatattatggaatgggtttacaagggacatacattgattattgtggataatgcggaaaggtgggctgagttcttagcggataaagaagttttggattatcgtggttcaaagaaactaggtacggcttggtatggtgggaactttttcaatagagaacatcctatttttgatggattgcctgtcaattgtgtctttaattgggaatatcaatgctttgctacttacaaccgtcatcgtgtagggttgcgttgctttaatggggaaacattggttgcttgtgtttccgatcataaaaaagaagtttattctgccttgtctgttattccggcaggtcgtggaaaaataattattactacattggatattcctgcatgtataaaggatgtcaaagcttatacagttcctgttgatcttgatggcatgaacgagtcgatgaatacttttaataccaaaagcgagaatagggctaatgtagtgggccaacagttattattgaatttaataaaagaaagtaatagataattatgaagaagagtattattgccatagcatttttgttgttatgtccattttatggggtgagagcacaggagagaccattttttgatttgtcaggaaaaggatggcatttatggcaggataaaaaagcgacttggcagacagaggatatttatttgacattggaagaggcacggaaaagtcctgtaattgttcctacagcgggatgggatatattgacttctgcccaggctcttccggtacaggttcccggaacagctgaagaatatcttcaaactcagtccggacccgaaggagatattacaggagttacatggtggagtcgtacaatggatattccggtgttgaagaaaggacaaaaagtctttttgaattttggctctatacgttcacgggcggagatttttattaatcagagattagtggattatcagattgtggacaatgttcctttcgaaacggatattactccttatataaaatcgggagaacaagtacaattggctgtacgtataacggatgcgggtggtaaccatgattggcgcgactccagaactattccgtggggagataaaatgttgcctcccggtcatggctttggaggaataacaggaaaagttggtatgaaggtctgtaatgctgtttatgtggcggatatttatatgcagaacactcctcagataaccaccgccaacgctattctgacattacagaatgaaaaaggaaagactacgaagcaggatcttcgtataacggtgtacgagtggcaaaataaagaaaaaatagtttattctaaagagataaagggtgtttcattaaataaaggcatgaatgaactgaatattcctgtatcagttccggatgcgaaattatggagcgtggatgatcctaatctgtatgtatgtgaggtggagttatccgaaggaaagaactgggtagataaagatttccgccgttttggattccgttggttcgaggcttctggtataggtgaggatgctgtttttcgtttaaacggaaaacgtatcatgcttcgctcggctatcagttggagtttttggccggtcaatggtattttcccatcggaagaattggctgaaaggcaaattcgcatagctaaggagttagggttgaatatgttgaatttccatcgttttatcggtaatactgacgtaatgaattatgctgatgagttgggactgctctattttgaagagcctggtggcttccgtctggatgtgaaacagccgtttatgaatgctgttttgcatgaaaaggtcatccgtatggtaaagagggatcgcagtcatccctgtctggttatctacaatatgatgaatgaatcgggaaatgctactcctgaaaagttagaattggagattcaagcgatgaaggatatgcgtgtactggatccttcccggctgattcttcgtacctcggcttgggcaaagggggatgatatagaagatcaggctaaaattcatattcgtccttacgatgaaaaagtgtattggagtggttggtatgattatcatcgtgccggaggacctgctgtttggaatgaaggtttgtacaaaggccctgaagattattataatgatacaaagaataagcgtgaaattgtattctttggtgaggaaggggctttatcatcacctcctcgtttggaaaaaaataaagaagatttagaaaaatatagctataaaggatgggatggtagagagtttttacgttggtatgatgaatttaatgaattcctggatgctaaacagttaaggacagtttatcctacggtagatgatttgtgtgtggctatggggactgtatcctatgagcaccaaggacgtaaaatagaatcggccagaatgaataatttgacggatgcatacgttgttaatggatgggaatcggaattgacggagaattattcgggaattgtcgattgttttcgttatcccaaatcagatccggctatcatagctcgttataatcagcctttgtatgtagcggtaaagaccaggcaacaggttgcagccgcagggggagaggtgaccgttgatttttatctgattaatgagaagaatgtccggggaaaccatcaattgaaaatctcggtgacagactctcaaggaaaagtgatggaggtagggacttatgaaacggaagctgccggaggtgaggtttatggtcagttgttggtgaaagatgtaaaaatacctgttcctacagctggaggactttgtagaattgaagcaaaactatgtaaggaaaattctgttgttacaactgggtatgatgatatattgtctgtaaatctggcatccaatatgttggatggtaaaggggccgtttgggaagatgggagtgctttacagaatttcttgaagggtaaaacgaaagaagcggttgcagcttatgaggataatttaggaaagttggattggattatggtggcccgtcctcctaggaaagatcagttgacaatggtgccgatggaagcgttacgctctgccgatggcaaaccgggattagatgtggtctattatgaggatatggaatttcagaaggaagtttatcatgaagtggccaaggtggttaatctgagtgctattgagggagctacaccaagtccttttgtgtatatgcttgatggttatggtattaaatggagtggtaaagtacttccctctgtcagtggtgaatatacaattattcctcaaagtaatgaccgtagtatgattgaagtctttgtcaatggtaagaaaatatatgaaataaccagaaagaaaaagcatttgggcgatggaaaagtctatttggaaggaggcaagtctgccgatatagagatccgtttcaggcatcctcgtagtaacgcgcgttgtcgtctggattgggccgttcctaatgataagatgccggatgcacagcgtttaatggaacgtgcagtaaatgatggaaccaaaatctttattattcagagtgctgatgaatggtcggaatttatagcggttaatagtaaagcggtgtttaaggacaaattttttgttggaaccaactggctgggcggggtgatgtttaataagccgcatgatattttcaaggaacttcctgtcggaaatgctctcaactggccttatcaggcattgatacatacaggggtggagcgtatgggattagtgatggaaggtgaagaattgctggtcggagcctatcatacttatcctatggctatcggaactgctatggggattgtccctatgggtaagggtagtgttttgttctctacattggatatctatgggaacatcattaatgattcggctgccggacttgtagctaaaaagctgattttcaatatgattgattttaaataaaataacagataccatgaaaaaaacaatcctatgcttttgtttatgcctgtattgtataggggtatgggcggctagtgcttcttttaagaagacaggaaatgatttgttgttttttttgcctcagggaaatgtgaaattggaattttgtacagatgatatgttccgtgtacgtcattctcaaggtactgtgttcgctgagaatgaacagtggatggttcggaaatatgatttttcttctgtcaactatacggtggaagatagaggtactgcatggttgattacgaccagaaaactgattatagaggctaccaagaatccattctgtctgtctgtttctgataaaaacggcaagatgctttatacagaacttgaggaacaacgtttttataaggattctgtcaagatgaaagctgttctacagccggatgagcatttctttggttttggggaacgtatggatttcatggatcagcgagggcgtaagatttatctgaatgtagagttgggaagagggataaaaccggctgtaggaggaaaagatattttacgtgccaattattgtcccgtaccttttatgatgagtaccaaaggatatggtttgttctttcatactccgtttgctaccgaatggaatatggggtgggatagtagtgattattattcgtttaaagcttttggcggtgatttggactattattttatgtatggtcccgatttttataccatgattgaccgatatacggaattgactggaaaatcccctatgcttcctcgttttgcaatggggttgcatgttggtacttattccggtggaacttggaagaatgaagagatgacttccgataaatacccgcttgctttatgtaaacgtttgcgtgaggaaggagtgccttttgatttgctttggctggattctacttggagattgtttaataccacttacggaaatggtggttgttgttttgaatggcgcaatacgttcaaagatccgaaagccatgtttgatagttgctatgcgcaaaatgtaaaaatggtggggcttcatatccgttccatattagataatggccctgaatatcatctattggataaggcgcgtgaacagggaaatgtgctgtatccaggagccaagatagaaggggtggtgaatttctttgatccgaaagcggtggattggtggtgggagaacggagtaatgaaagtggcttccatcggggctaagtttgtgaaaacggatgtcggagggacgatggacctaaaaggacttcataatatttttcctttagcttatgcggaagcgccctatcgtaaatttcaggaatataataatatgaggggggtgacacatacccgtgagggttatgcgggaattcagcgttatccttatatttgggccggagactgggggagtgaatggcagtggtttgaaccggtgatacgtgcgggacttaatatcggtatgagtggcgtgggtaactggactcattgcatgggaggatttgaacagtattctccttacgatacggaattatatactcgttgggtacagttcggtatgttttcacctatcgccatggtgttcggtatggatcacccccgttatcatgaaccttggacttatggtccggaggctttggccaattttatcaagtacgatagtttgcgttatacattgattccttatatttatagtaatgcttatcagctttataaaacggcacgtcccatgatgacccctttagtgatggattatcctcaggatgagaatacctatcagctggcgcgtcaatatatgttcgggccatggatgatggtttgtcctgtcactaccaaaggtgcactgagccaacatgtctatttccccggtggagaatggtttgattatgaaaccggtgagcgttacgagggtcgccaatataagtcttttcttactccgttggatgtgttgcctgtctatataaaagccggagctattattcccatgcaacctgctatgcagtgggtagatcagcatcctgtagatgtgataacattggatgtctatccgtcaggtatttcttcttatgagatgtatgaagatgatggtatatcaatggattatcaaaaagggattggttcattgacccgctttaccagcaggctcgctgatgatagctggacgtttactgcagataaaccgatagggaagtacaaacctgtcagacacacttatctggtgaaggcttatttgcagaacgctccgcaatctgtgatagaaaatggtaaatcgttgcccgttctttcatcagttgcagatgcagaccggaatacaggctggttttatgatacggagcataaacgtctgtatgtgaagacagccggagataaccatcagaaaattgaaattgtggtacaataacttaaaggattgattctatgagaaaaatcatcggttttcgcactttgtgtgtaagtttgggaatatgggtggggactttggtggtatctgctcaaggtgagtttaaggcattaccttggagtcaaagtaccgcttataattcttatctgatgcgtgatgtgcatcggcagtttgccgaccggcagtttgccattcaacaagcgtttgcttctcctgccgggatgcagaagtatctggagggttgccgtgaacgatataaacaaatagtaggtacttttcctgaaaaagggagtttaaatgctcaggtggtagggaaggtacaaggtacgggttatcatatagagaaaataatttttgaaagcaagcccggccgctatgtcacagcacatctttatatgccagagaacactactgttcctgttccggcgacattggaactttgcggacatggattgaatggcaaaggtccttcgtctcatgccgctatgttgatggcatccaatggtattgctgtgctggtggtagatcccataggccagggagaacggttgcaaattattgatagggaaggaaagccgctgacacggggggctactacggaacataccttactgaatgcgggctttaacttgcttggtactagtttggcagcacaggaatattgggataatcatcgggctttggactatttactgacccgtaaggatattgatccggagcatatcggagtatatggatcttctggcggtggcactcagaccgcttattatataggtttggatccccgtgtaaaggtagcggctatttgtagtttcttttctacccgagaacgtactatggagttgcaaggtccttccgatggttgccaacatataccatacgaagggcgtgaacaactggaggtacctgattttgctttaatgatggctccacggcctttattgattttaagcggtaaatatgattttgtcgatttatggggtgcgcaacaaggatttgctgaattacaacagtgctataaagtcttgggagttcccgaaaaggtggatatgctgacagtagaaaccggtcatggacttggagctgaaaaaaggcaaaagttggtcagttggttcaagcgttggttgaaagataatcaatctccggtgaagaaagcggcacaagaccgttttcagttgtcagatatgctttgtacgactaaaggacaggtgaatgtatctatgcctggagcactcagtattatgcaggaaaatgtgaatcagctggatgagtgggcttccaagcgtgagacgtttctttcgaaaggaaagaaaactgttcaaacaaagatgctggatttgttaggtcttaaaggtcttcctgaccataaaataagaattgaggcaaccggacatgattcaatgcgtgaatatgaacaatataagtttcagctcataagggaaggggagatgcctgttccttgtattcttatcatgccgtccagagcgaatgctgattctcctattgagttaaggttgcaggaagaggggaaaggaacttatttgagtgaatatgcgaattttgctgctgccttgacggaaggaaaaattttgttgttggcagacttgcgcggattgggggaaacaacagatcctgcattttatacggatgctaaatattggaaccgtgaatatcgtaatgcaatgatcagtatgcatatagggcgtcctattatgggacaacgggtagtcgatatcctgactttgcttgatttttgttcagaacatgaacttttgaaaggacatcccgtcaaagtatttgccaatggtatttatggtccagctgtaattcatgctgcttatttggatgaaagaatcaacagtgtggagataacacatagtgtgaagacttggaaggaatacattgagaagcctatgcagtgggatatgtattctaatgtgttgtatggtgctttgaaatattatgatttaccggatttgataaggttaagcaatcgtcccatccgttttgcagattaaaaaacagaattcatctccactgtaggagcatattaaatgtcctgaaggcacaacaatctgctcctgcagtggatggaatatatggcttgtctatttcttttccaggaaatcagcacgcatcgggctgaaacaatctatcagcatacccggctccaggcatacacaaccatgcactgcatctggttccttatacagacagtcaccggccgatacaatttttttcacaccattgatggtgaactcaaattttccactttctacataagtcacttgtgaatggatatgatggtgaacagctcctacagctcccttttcaaattttactttaacaaccatgatgtcatcattgtaacccatgatttggcgcactacaccttcgcctgcaggttcccattctttgccttctgcaaaaatgaagttttcactacctgttttcataacctttttttcagtgtttttgtttgtttcttcagtacactctttgtcgctctcttttttttcactttgtgcattgcagctctgcaatattagtggtgccatcagggcacaagcatacaatgcggttcttactttacgattcatgatcttgcatttaatataaaatgaataactaaaacttttcttcaaatatatataatatataaggagagtggttcaccgtgattaaaatatacgaggaaaagaccaaatattacaatcccataccctaaaaaatggcttattttgcttcataatgatattcaaacttgaatcaaaacactacaacaacaatgaaaagcacattaaagaagagatggggaagaattgccctttgcttgtgtatggcaaattttgcttgcgcaggtatggctcaaactaataaaaagttagatgaccaagtgataaatacaatgaaaaccgccactcagtttatgatggataaagtgagttataatggtggttttgtatggaattatttgccggatatgtcccgctcatggggagagatggaagccaagaggacaatggtttggattcagccaccgggaactccttctgtcggtcatttgttgcttgacgcttatcatgctacaggagatgagtactattatgaagctgcccaaaaagtggctaacactttgatttgggggcagcttgaatgtggaggatggaattatgtatttgattttgcaggagagaactcgttaaagtcttggtatgataccgttggtaaaaatggctggcgtctggaggaatttcaacattattatggaaatgcgacttatgatgatgcgggtactatggaggctgctaaatttctacttcgtatgtatgtggaaaaaaatgatcctgctttccgtccggctttggagaaaaccattgattttgttttgaaaagtcaatatccggtgggtggatggcctcaacgttatcctttgatgtatgatcacccttttcaaggtaagaaagattattcgtcttttattactctgaatgatgatgtgattcctgatgcgaccgagtttttgattcaatgctatcaagcaatggggttgcaaggggtaaaggagcctattatgcgtgctatgtacttgatgatttctcttcaacaaggggaaccttatgcaggctgggcggaccaatatacagtagatgatttgaaaccggctcatgcccgttcttatgaaccgcgcagtgtgaataccggtactaccgtccgtcttatcaatttaatgatggattactataaacttacagctgatactcgtttcctgtcggggattcctgctgcaattcgttttttggaatcaatgaaattaccggaatcggatgtgaagaaatggaagcgtcagtctactaatccggaagctattttggttcctcgttttgttgatcctgatacaggtaaaccactgtatgtccatcgtaagggaagtaatgtgaaaaatggaacgtattatattgatcagaatatagaaaatacaatagctcattataattcggcaacttttgtgaatcctggtgaactgcgtcgccgttatgaggaagtgaagaaacttcctgtatccgagttggcgaagaattcacctttgctacaggatcatttggttcctttacctaaatattatactcgtttacgtggaaaagctacggaagaagttgcccggaaattggtgcaatcactgactaaggacggttgctggctctctcctttaaagtcaacctcgaacccgtataagccatatactgtttcagggcctagtgaggaaacgaaatatatagctacttttgtaggggacgagcacgatacatcaccttatccgtgtactaccggagaattgtgcatctctgtaggggattatattgataatatgataaaattaattagttaccttgaaaagtaaaagtttgttaggtataggtttatgaagaatgctgtaatttgtttattgttgttcgggatatgtctgacggtttctgctcaagaaaaggtggaaaccgtctctatgcgttatgaaacgcagaatgatatgccgctgttttatcagaagctgaaagaaagtctgacttatcctatggcatgggggaactcttctatccgaaattttgaaaaatggcgtgaagaggctagaaaagttttgttggattgtatgcagcctgctcctcctgtagcggcttttgataaagaagtgatagatattgagcggagggaagggtatacagtggaaaaaattctgtttaatgtttcggaatattcccgtgttcccgcttatctgttggtccctgaggggaagggaccatttcctgcagtgttattacttcacgaccatggggcccatttctcaatagggaaagagaagatggtacgtccgttcggtgtggaggcatctgtgacagccgatgcggatgattgggcggaaagatgttatgataaacagtatgtgggtgattatctggcaagccatggatatgtagtgcttgctgtggatgccttgttttggggggaacggggacgtaaggaaggagtgcgctatgactcacagcaagcgttggctgccaatatgctacagatgggaatgtcatggggggccttgattgtttgggatgatatccgtagtgctgagtttttggctacattgcctatggtcagtaaagatagaataggtactatgggcttttctatgggagcacatcgtgcttggatggtcagtgccgctacagatgtggtgaaggcaggcgctgctgtgtgctggatgaatactacagatagcttaatgacacttaccaataatcagaacaaaggcgggtctgcttattccatgattattcccggaatacggaattggatggattatcctcatgtggcatctatcgcctgtcccaaaccgatgttgttcatcaatggtttgcgggacaaactttttcctgtaaagggcgttgaaagcgctttctctaccatgcaggatgtatggaagggtcaatcggtagaaaatctattgactaccaagttctatgatttgcctcatttttgcagtaaggagatacaggctgatatacttgagttctttaatcaaaatttaaaatagaaagcgatgaaaattaagatgttgatggcatttgttgccttgttgttattttctgcttttacggcagaccacacaattactatctttatgataggtgactcgactatggccaacaaatccttagagggaggtaatcaggaacgtggatggggccatgtgctgggaggatatttcagtgaaaatattcgtgtggaaaaccatgctagaaatggtcggagttctaaaagttttattgatgaaggattatgggaggtagtaattaataaagtaaagccgggtgattatgtttttattcagtttgggcataatgatgagaaggtagatgagaaacgtcatactgatcccggatctacttttgatgccaatctacgccgttttgtaaaagaaacacgtgccaaaggaggaattcccgttttgttcaatgctatagttcgccgtaattttcggaataataaaaatgcggtggccgaagatgatgtgcgcaaggatttgtcaaaggggggtgtttctcaagatggagaagtgctgattgacactcatggaaaatatttggattctccgcgcaatgtggcaaaagaattggatgtgccttttgtggatatgaataagataacgcatgatttggtgcagagaatggggccggaggcctcaaaaaaattgttcatgtggattcctgaaggcgtgtgtgcagcttgtccgaaaggccgtgaggataatacgcacctgaatgtatatggggcgcgtactattgcaggtttgacagtggatgctatagctaaagaggttcctgtattggggccttttatacgtcattatgattttgttgtggcaaaagatggcagtggtgatttctttaccattcaggaagcgatccatgctgttcccgattttcgtaaagcaggacgcactactattctagtccgtaaaggggtatataaagagaaagtggttattcctgaaagtaagattagtatttctttgataggtgaggacggagcaattctgacaaatgatgattttgcttctaaaaagaactgtttcggagaagaaatgtctacctccggttcatcaacctgttatatctatgctcccgatttctatgctgagaatatcaccttcgagaatagtgccggcagagtagggcaggcagtggcctgttttgttagtggagatcgcgcttatttcaaaaactgtcgttttttgggaaatcaggatactttgtatacttatggcaaagacagtcgtcagttctatgaccattgttatatagagggtacggtggattttatttttggctggtctacggcattgtttaaggattgcaccatccatagcttgggtgatggttatgttaccgctccttctacagatcaaggcaagaaatatggttatgtttttattggctgtaaattgacgggtgtggttgaggctcagaaggtgtatttgtcccgtccttggcgtccttatgcacaggctgtctttattcattgtgatttaggaaagcatattcttccggtggggtggaacaactggggcaaaaaagaaaatgaggaaaccgtattctatgctgaatatcagaatacaggagaaggggcggctaccgcttcgcgtgcttcgtttggaaagcaactgaacgatatcagtaattataatgaagcacagattttggcaggtgatgacggatggaatcctgtggaaaatggaaatgtattgttgcagaatttaaagagataagctgttttttcttcatgtaataatactttgtcactgtagggatggatcttatttacccctatggaaaatgtcaaggaagagtggaatgataaaaggggtatttaactttgccccttttatttttttaggaacttgtatgtcggtatctctcgttttttatgtatttttgccatactatatatgaaaatctacgaaatgaaaagacacattctgtttatacttactttgctgttctttttttatgcaaaaagtcagcctaattgtatctttactcattattcttcggaaaacggtttgtctcagaactctatcatgagcatggtacaagaccataatggagtgttatggttctctacttgggatggaatcaaccggttcaatggttatgacttcaaagtttataaagccagacaagggaataaaattactatgactaacaaccgggtagacttattggaagtagacccttataattatatttggctgcaaacgtatgattaccgtgtgtatcgttttgaccaaagaacagagaaattcgaacaaattcctgcagaaggtgaagaggagggcatgcgtttctcttctattaaaatattgcccgacagtgtcatttggctactttctgaaaatgagggggctgtccgtgtgaaaacaaatcctaaggattacagtgtaaccactcaagtatatgctactcatagtcatggaggaaatgccgctcacattaatcaggtttttagcgatgcttataatcaagagtggttacttactgataacggtctgctaaagattacgaatgataaagaagagcctgtttcttattttgtgaatatccaatcaggcaaagatgaatccgtacaggctttctactctttttgcagttatggtgacgaactttattttggatcagacaggggacggatatggtgctattctttgcaaaatgaaatctttcgtctttgggaattgccggtaaaggataaagtgattgctataaatgaaataaaaggtacgggactgttgataacaactgcccatgaaggattgatattgtaccattcggatacaaaagagtgtaaagtctataataaatccaattgtcccgaattcccggcagacgctttccgttctgtttatgttgacagtaagcaggaagcatggtttgagatgaccgaatggggaaaggtttgtcatttcaatcctttgacggaagtatttaagcaagaaaagatgcaagtggagcctcgtggtgccgatcgttcctatcccagttttcatatttgtgaggacttgaacggtaatttgtgggtacatccgcaaggaggagggctttcttggtatgacagggaggcaaatcggctgttacctttctacaatgaccccgattcacctgattggcacttttctaacaaattacattctatgttatccgataaacaaggcaatctttggttatgtactcattctaaggggttggagaagattacttttttaggaagccagttccatatttatccccgcatggggcacagttatgacttgaatgccaatacggtacgtgcgttgtttgaagatagcgaacatcgcatctggatgggaaaacgggacggtcagattgaaatttattcttctgatttagattttcagggtattctgactgaagaggggattatagctaaatctggtaggccgttaagtggagttccttatcatatcatgcaagattctcgcggaaacatttggattgctactaaaggggatggtattattctggcagaaaaggagggggcacattttaagtttactcgattcaaatatgatgaagatgatatttatagcctgagtcataatagtgtttactggttacatgaagacaagcatggacgtatttgggtggcaacttttggtggagggttgaattatattcagaaaactcctgaagggaaatatgtgtttattagttctagaaataacctgaaaggttttccgtatgaccgttgttatcgtgtacgccatatcacttctgataagaaggggaatatatgggtggggagcagtgatggcgcacttagttttaaagaggattttaaggatccggagtcgattgtgttccatctttatgcacgtatccccgatgatatgaattgtctgagcaacaataacgtatatcgggttgtaaccacttctcaaggagaagtttatttagctacatttggtggtggccttaaccaacttgtttccatgaacggagaagggggagctgtatttaaatcctatacagtgaagaatggtctgccttcagatatcctgttgtctgtagaagaggatgacacaggaagcttgtggataagtacggaaaacggattgagtaaatttattccgtccgaacaacgttttgagaattataatgaaagggattttggtggtaagatacgttttgaggagggaacgtcgttgaatcttagttccagcaccattttgtttggtaccagtcgtggcgtgctttattttgaaccagagcatattaagaagagtaattatgtaccatccattattttaggtactttgaagatatccaatcaagaggtagttccaggggtatcaggaagtttgttgcggcaatcactcaataatacagaacatctggtactttcacataaggagaatattgtaaccctatcgtttgctgcattggatatgatttatcctgaaaatatccgttatgcttatcgtttacgcggatttgataaagaatggaattatgtagacagacagcgtaccgctacatatactaatcttccgaaaggagattatgtttttcaggttaaatcgaccaatagtgatggtgtttgggtagagaacgagcgcagtttgagaatcaccattcagccttcgttttgggaaacagcttgggctatggcaatttatattcttgcttttctgttgattctgttttcaggagtatatatattgtttactatttatcgtctgaaacatgaagtgtctgtggaacagcaggtttctgatataaaacttcgtttttttacaaatatttctcacgaacttcgcactccgctaacgttgattgcaggtcctgtagaatatgttttgaaaaacaagactttgccagatgatgtacgtgagcaattgcatgtagtagaacgtaataccgaccgtatgcttcgcttggtgaaccaaattcttgatttccgcaaaatacagaaaaataaaatgaagttgcgtatagaacagatcgatattgttccttttgtacgccatatcatggataattttgaatcgttggccgaagagcatcatattgattttgtattcgaaagtgaaatgccttccttgaaactgtgggtagatgcggataagctggaaaagattgtctttaatctgctttccaatgcttttaagtatactccacagggtaagatgattacgcttttcattcatgaaaatgagcataatgtggcgattggtgtacaggatcaaggtataggaatttctgaaagcaagaaagcttctctttttgtccgttttgaaaatttgctggacaagaatttgtttaatcagcaaagctcaggcatcggtctttctttggttaaggaattggtggaactgcacaaagcgactatccgtgtggatagtaaagagggggagggcagctgtttcacggttgagtttttgaaaggtaaagagcactatacggagaatgtggagttcattctctctgattctgtcgaaatgaggccggaagaggtggaagaaccagttcagggacatgaagagaaaaggaatgaaagtaaaacgatgttgctggttgaagataatttggaacttcgtttctttttgcgtagtatctttatctcaaatttcaacgtcatagaggctgttaatggggctgatggtttggataaagctttgaagtttgttccggatattattattagtgacatcatgatgccggaaaaggatggtattactatgacagaagatttgcgtgctaatatggcgaccagtcatattccagtggttttactgacggctaaaacggatatggacagtaagttggagggtatggagctgggagttgaggattatataacgaagccatttagtgccacttacctgaaggctagggtggagaatattttgacacaacgtgtcaagttacaacagttgtattgtgcgaatctgatgaatattcagcctgttccggaggaagaacagcaaacacagcctgagatgtcttcgcatgaccgtaaatttatggaaaaactgacggaattaatggagaagaatatggataatggcgatttgatagtggatgatttggtacaagaacttgcggtgagtcgttctgtctttttcaagaaactgaaaaccctgacaggacttgcccccattgagtttattaaagagatgcgtgtgaaacgtgccgcgcaattgatagaaagtggtgattataatatgacgcagattgcttatatggtaggtattaatgatcctcgttatttcagcaaatgttttaaacaacgttttggtatgacacctactgaatataaagagaatgcaaaaaataagcgataacttttgctgctatttgttagttcttgcagcgtttattttttaatgatttcttaaagggtatgtttaagtgtcgggtatttcttttgttatgtgagtgagttgctcatgttattttattattttttcgaatatgtaatgggggtttttctgaatttttagtcttttacatagataatgaactaaaaagaggaaaaagatgaaaaaagtaattttatttatggtaggtgttttggcgagtctgatgttgagtgctcagtctcgttggagtgttacgccggaagccggcttggtagtgaataaggaaaatgaagggacatcagttacattaggttttaaagctggtgccggtgtattgtatcagttaaaggaaggggtgggaaaaaagccttcttttggcttgaagtccggagtttatatcttaatgcagaaaggtgggtatcatcctatgagttggggaaacatatcaacagggggaggatttagcatggattatgaaaaaacggatgttgagtccacgcgttattatttgcaattgcctgttatggctcattggggttttaaactttgtgatgatgtgcgtcttaaattagcagtagggccttatgtagctgtaggaattggtggacgcactcatgcttatgtttcttcctcaaaatataatatagatgaagaaacaggtgttggacagtatgaatatcggaatgattattaccggtttggcacatttaaaggaaaaacagtaaatgaggaatttggttttgaggcgtcccctcgtttggattggggaggaacggcttctgtcgggattgctgttaaacggatttcatttactatcgggtatgatttggcttggggaaaatataataaggaacagaatgatttaaggatacggaatcatatggttagctttatttcagggtatactttttgataagaaaaaggataaatgaaacaaacatacacaaaatttcttgtttaagattgttaaatgaagaattttgtgtatgtttgttttttcataaacacgataaaagttcaatctatgaggaaaatgctattcattacccttttaatgggcggtctgtgtacgactgtctctgttgcaaaggcacaggaacgcttgccagaatacctgcaggcagagaagtacacacaagaaaaattgaacaccatgttgttttctactgtggtggatccgcattggttccagaaaggtaataatttctggttcgagtacaaaacaagtgaaggaaccttttggtatgtggttgatccggttgcccggacaaagaagcttttgtttgatagggatgaattagcttctcagcttactgaaattgtaaaagatccctttgaggcacgccatttgccaattataaatctgaaagcgaaagaagatgggcgtacctttacttttgaagtaaaatcaacaaaagatgcgacaccaaagacagaaggtaaggataagaaagacaaaaagaatgagaaggaaatcttttatttttcttatgactatcctactcgtaaattgactcatttgaaagataaagaagacgacctgaagaaaatctattggggatcagtttctcctgatggtaaaacggtgatttatgccaaggatttgaatttgtatcgtatgagtcgtgaagattatgaaaaagcgaaaaaaaatgaaaaggatagtacgatcgtggaaatccagcttactacagatggcatgaaggattttggctatggtattccctatagtatgcttaatacagatactttatgtaatggcaagcgtcgtcgtgtaggtggagtgtggtctccggattcacgttattttgctattacagtttctgacgatcgcgctgtgaaagaattatgggtaataaattcgatggcccatccgcgtcccacattggaaacttataaataccagatgccgggagaaaaggaagctcccatagaacatctgtacttgtttgacttggttgataataaacgtaaggaaattaaagtagcagcttataaagatcaaagcattggcctggaatacaaaccaatgatgcaaaaacagcgtgatatggaagatcaggctgtcgtttggcagggtgataacaaccgtttttttctaactcgcagcagccgtgatttacatcggattgatgtttgttcctatacgataggacaggattccgttgtacctgttataaaagaacggatgaatacctatcaggaaactcgtcctttaagagtcttgaatggtggaaaagaaattattcaatggagtgagcgtgatggttgggcacacctttatttatatgatgatcagggtaatttgaaaaatcgtatcacaaaaggtccctggcacgtggaggaaatcttgaaagtagatgataaggcgcgtgtgatttattttactgctaatggaatgaatgctaaagaacatccttattatgaacatttgtatcgtgtgaatttggatggcagcggtttgaaactactgactaaaggggattatttccatcgtgtggaagtggatgatgatgctcgttttgtggtggataattattcgcgtgtaaatacagtgccttgcgccatcctgctggatactaatggcaataaagtaatggatattcaggagagtgatttttcacagctttttgctgccggttataaatttccggaaatatttaaagtaaaggcggctgatggtgtgacagatttgtatggtgtgatgtataaaccttttaattttgactcaactaaggtttatcctattgtggattatgtttatcctgggccacaggtggaaggtgtttattatccgtttacccgtatgagtccccgtaccgaccgtttggcacaggccggatttattgttatttctgtaggacaacgtggcgggcaccctagccgctctaaatggtatcataattatggatatggaaatatgcgtgattatccgctggccgatcataaatatgctatcgagcaattggcgcagcgtcatcattttatagatatagataaggttggtattcatggacattcgggaggtggatttatgagtacggcggctatgtgccaatacccggatttcttcaaagtggctgtttcttgtgccggaaatcatgataataatatctataaccgttggtggagtgaaacgcatcacggcgtaaaagaagtagtgagtgagaaaggggatacaactttcgtttataagattgctactaatcctgaaatagcgaagcaattgaaaggaaatttgttgctgattcatggtgatattgataataatgtacatccaggcaataccttacgggtagttgatgcattgattcgtgccgggaaacgttttgatatgctgattcttcctcaacagcgtcatggattcggcgatatgaatgaatatttctattggaaactggtagactacttctccgaacatctgaaagggagaagtgaaaaatcggtggatataccgaaacggtagatttaggataattgccggacgaatatgaaaggagcacagagggttcgtgtcattaagatacctttgtgctccttgtttttatagcagactgttgatataagccttcatgtccggtgtcgcggattttgcttccagatacagtttatactgcgctttggtacgtaccagattatggtctttataccgggtttgataatacgtgtctccgtttatataatctgctaaaaagcgtacagcttgcatataagggaacagagttgcagcgtatggtagcatttctatttcaagaggggtcaggaaagctcgggccgactcaatataacctttggtaaatgctttgaagatttccatgttgaacttcaccttatttaaatcagcctcatcctccttgccggtattggctgccgaacggaggaaatcaccgaaatcggagaaaatgaaactgggcattactgtgtccaggtcaatgacgcacaacacttttccgttttcatcaaataacatgttgctgacttttgtgtcacagtggcagatgcgtttgggcaatttgccttcacggtaaaaacgttcagcgctgcacatcgtatcagcatctttttctattgcgtccactatgtcctgtacttctgccaaacggccagacatgttggcagatacggcttcacgtaattgttttaagcggaattccatattgtggaaatcggggatgatttctccgagttgttcgggtacatcagccagcatggcttggaattcaccaaacttcagtcctgccagataggaggattccggtgtaactgtttccaatgtttgtgaacgtggaataaatattgaaattcgccaataaccttctccatcatagaaataggttttgccattggtggaaggtagaaaatggagtaccttacgttcaatgtcctcttcgtgtctggcttccagcttttggcggatgtgtctggttactacttctatattgtgttgcagcatttcaatattggtaaatattaaatggttgattcgttgcaatacatagtcaggctcttcaggagataccgattttaccagataagtctgattgatgaggccggatgtcaaagctttgatttctttcacttcacccactttggggaactgtttgataatttttttgaggttttccataggtttgtttgaataatgtctatatatgaaacaaagataacttctttccttcaattggaggaaagaagttatcttaaaaaacatataataggaatataaatctttttatttttttaaatcagtctggaacatacggtcagcgcgtaacagatgacgccagtaggaaaccaattcttgtgattcctgcaatacattgaggtacaccatagaagcttttacattgacatcccgttcttgtatgcggtccatctgttctttgcgcaaggtggagatcttgcctttcagaagggcgccttcacgtagcaaagcatcagtctggtcgtaggccttgttagcaagtacttcagtagctttggccattaatgccgtcatctcatcgcggatagggatgaactcgttagtggcacgttccgataatggggtgaacttattgtccacatgttctttacaaggctcgcagatacgtttcagacagtaaagcatttgttcacaactgttgcttcctaaatggaaccaagtatttttctcaatagcagtgaagttgtctatgcgacgtaggcccagtatttctttacggcgtatcttttttaacatttctttctggttgtcagtattgctcacggccttgcgcagagctttcagattttcgttgatgaaaccgtcggttatctgccggtaggtttcattggtgaatgccatttcggctaccaatgtgttatttacatgctggcgaagtaatgtccaacgctcttctttgtctttactggcaatgaggcgggagaatatgtcgtctttgcctttatccttctgtttcttgctgtagtgtatgttgctgcgtaccaataggaagatggcaagtgcaataagagccaacatggcgaatgtgcctccataatacatgatgagcgtaaccacaaaacagatagtgaaagcagctccggcagtaatgaaccatccaccgataacagaaagcacaccggtgatacgatatacggcactgtcacggctccaggcacggtcggctaatgaactacccatagctaccatgaaagttacgtaagtggtagaaagagggagtttcaaagaggttcccaaagctatgagcagaccggccagtaccaaattgacagaagcgcgtatcaaatcaaatgctgccccattctccataatcatcacatctttgttaaaacggctgtcggcccatcgtttcagattgtcgggcaatattttggctatattttctgaagcgctcatggtagaacggacaatactgcgtgctacagcggaagaaccaaacatttcgtcaccttcatcctgacgcgagagatctaccgaagtcttcactacattttgcgctttttttgaagtaatcagcgcatataccatgatgacgcctgctaaaaataaaaaaaggaatggggttttagccggaccattcagtgaattcatcaagtatcccattggttcaccgtttccattagccatgaagtctgtataagctgagaagcctgccaaaggcacaccaatgaagtttactaagtcattgcctgcaaaagccatagctaaggcaaaagtacctaacattaccaccaccttgaatacatttatcttgcaccaatgcagtatttgcatcagaatggtgaagaacacaaaactgcaacttactaacatcaaggtgttttcctgaatccaatgtttgttttcggcagtcatgaaggcggaatctttcagaccttttatcaacatgaagtagataatggccgtaacagcgataccgccgaacagtccgatagtgtatttcagtttctttgtataattaaatgtgaagaggagacgggagagatattgtactaatgtgccgaagaagaaggctactgctactgagaggaagatacctaaaatgacggataatgccttttccgtattcagcagatcagcaaatcctagcattccggtttcgtcttctgctattttgataagagctagaacgaaagttcctcccaatagttcgaataccatggatacggtagtggaggtaggcattcctaaggaattgaaaatatccaataggactacgtctgttaccataactgctagaaagatacacattaactcctgaaaataaaattgttcaggtctgaaaataccgtgtcgtgcgatttccatcataccgttgctcagtgtggcgccgatgaagataccgaaagcggcaatggcgatgatggtcttgaatgacgcggctttagcaccaatggcggaattcataaagttcactgcgtcattgctgacgcctactaccaaatcgaatatggctagcagaaaaaggaatacaacgattcccaaaaacatagtttccatataattttgtctctctattttattgggcgcaaaggtacgggaggtatattatgataaaatgtcatatatgttacatttgtgttacaggtgttttttgttcaccatagattgcacggattcacacaacttgatttttaatttattattatccatatttagtggcgaatctcttcttttttgagacaaatatgagtggataaataatatttcacgtttatgtgtggaatttatagagtgaaaatttatacctttgtagcccaaatacttaatctataaaaaatgtcagaggctaagagaattaaaaccgcattggtgtcggtttatcacaaagaaggtttggacgagattataaccaaactacacgaagaaggagtagagttcctgtcaacaggaggtacaagacagtttatcgaatctttaggtttcccttgcaaagcggtggaggatcttactacttatccctctattttgggcggacgtgtgaagacactgcatcctaaagtctttggaggtattttatgccgtcgtggtttggaacaagatatgcaacagatagaaaaatatgagatacccgaaatagatttggtcatcgttgacctgtatccgtttgaggcaactgtggcttcgggtgccgaagaacaagctatcatcgaaaaaattgatataggtggtatttctttgattcgtgctgctgctaagaactttaatgatgtagtgattatcgctagtcaggcacaatataagccgttccgtgatatgttgctggaacatggcgctactacttcacgcgaggaacgccgttggttcgcaaaagaagcgtttgctgtttcttctcattatgattctgctatctttaactattttgatggtggtgaaggttcggctttccgttgcgcggtggaagaacaaaaacaacttcgttatggtgaaaatcctcatcagaaaggttatttctatggaaatctggatgcgatgttcgaccagattcatggaaaagaaatttcctataacaatttgttggatatcaatgcagctgttgatttgattgatgaatttgatgaggtgacatttgccattctgaagcataataatgcctgtggattagcttcgcgccctactgtgctggaagcatggaaagatgcgttggcaggcgatccggtgtcggctttcggcggtgtgttggttactaatgccgtgattgataaagaaacagcagaagaaatcaataaactgttctttgaggtaattattgctccggattatgatgtagatgcattagagattttgggacagaagaagaaccgtattattttggttcgtaaggaagctaaattgccgaagaaacaattccgttctttattgaatggggttttggttcaggaaagagacctggatgtggaaactcctgccgacttgaagcaggttactgaaaaagctcctacggcgactgaagtagaggatatgttatttgcaaataagattgtgaagaatagtaaaagtaatgctattgtactggccaagaacaaacaactgctggctagcggtgtcggtcagacttcacgtgtggatgcattgaaacaagccattgaaaaagcgaagtcatttgagtttgatttgaatggcgcagtgatggccagtgatgctttctttcctttccccgattgtgtagagatagcggataaggagggtgtgaaagctgttatccagccgggaggctctgtaaaagacgagttgactttccaatactgcaatgaacatggcgtagctatggtcgttacagggattcgtcactttaaacactaagatcattgcaatttaccatttgcggctacaatcggactgtttatacagcattgttcagtaaatggtcaattgcaaatgtcaattgtaaattgctaaattgtaaatgaatttatgggattattctcctttacacaagagattgcgatggaccttggcactgccaataccatcattttaaataacgggaagattgtagtggacgaaccttcggtcgttgcgcttgatcgccgtaccgacaagatgattgccgtaggcgaacgggctaaaatgatgtacgagaaggaaaatccgaatattcgtactgtacgtccgctacgcgacggggttattgccgattttaatgcctgtgaacagatgatgcgcggtttaataaagaaagtgaacatgggtaatcgtttcttttctccttctttgcgtatggtgatcggagtcccctcgggtagcactgaagtagagcttcgtgcggtacgtgacagtgctgagcatgcgggaggacgagacgtttatttgatttttgaacctatggccgcggctattggtatcggtattgatgtagaggctcctgaaggtaatatgattgttgatataggtggtggttctacagaaattgccgtgatttcattgggtggtattgtttccaacaattcgatacgtattgccggtgacgatcttacagccgatattcaggaatatatgagccgtcagcataatgtgaaggttagtgaacgtatggctgaacgtatcaagatacatgtaggtgctgccttgactgatttgggagatgatgctcctgaagattacattgtacgcgggcctaatcgtatcactgctcttcccatggaagttccagtgtgttatcaggaggtggcgcattgtttggaaaagagtattgcaaaaattgaaacagctatccttagtgcattggaacagactccgcctgaactttatgctgatattgttttgaacggtatttatttggctggtggtggtgctttgctgcgtggtttggacaagcgtctgacagacaaaatcaatattccgttccatatagccgaagatcctttgctgagtgtggcgaaaggtaccggtattgcactgaagaatgtagatcgtttctcttttttgatgcggtaaataatttgctaatgaggcagtttgctaatttgctaatgccatgcggtatggatagcgcagtacattggcacattggcaaattagcacattgaacaattagtattaatgaaaaatctgctgaatttctttttaaagtataattactggtttctctttgttcttttggagataatcagttttgctttattattccgcttcaacagttatcagggaagtgcgttctttacatctgctaattttgtgtcgggagctatgtatgatgcagccaataatgttaccggatattttcatttgaaaacgattaacgatgagttggtacagaaaaatgtggaactggaattgcagttggagagtattcgtaaagctttgattgaagcaacggaagacagcagtggtgtggaacagcttaagcaggaagcactggcaggatatgatatctttaaggctagcgtgataaataacagtgtgacccatgctgataattatattacacttgataaaggagaagtagatggcattcgtagtgagatgggagtggtaaatggaagcggtgtggttggtattgtttatctcacctctccacattactccattgtcattccggtattgaattccaaaagcagtattagctgtaaaataaaacggagtgattatttcggcttcttgaaatgggatggcggttcatccgaatttgcttttataaaggatatgccccgtcattcattattttctttaggtgacactattgtaaccagtggacacagtgctgttttcccttccggcattccggtgggtacggtagatgatattgccgatagtcacgatggcttgtcttatttgctgcgggtgaaactatttacggacttcgcccgtttgaatgatgtgcgcgtaattgctcaaaaagggcaggaggaacaattggagttggaaaagcaggtaaaaacgattaagtaagaaggttgatgttgacttatctacaaagaatagagtggtttatcggactggtactgttgcaggtgttggtgctgaatcatatgcatatcaacgggtatgccactcctttcttttttatctattttattttgaagtacaattcgggagttagccgtaatgtccttatgatatgggcattcctgttgggattggcagtcgatatatttggcaacactccggggatgaatgcggctgcggccactgtactggcttttatgcgtgaacctattttaagattagtcacactccgcgatagcgtcgaggattttgaaccaggtatcaaaagtatgggattctcgcctttcttccggtatatcttattgtgtactttcttattttgtaccattttacttgtcatagatactttttcattcttcaatctgcctgtcttattgttgaaaatattgacagatgcctcaataaccgtcatttgtatattgtgtgctgaggcaatcaggaggaaaaaatagtggaaagagattataatctggagaagcggaaatatgtaatcggtgcatcggtaatcgttattgtgctgatttacttgatacgtctttttaccttgcagattatgagtgaggattataaaaagaatgcagatagcaacgcttttctgaacaagacacaataccctagccgtggggtaatgtatgatcggaacggtaacctgctggtatacaaccaacctgcctatgatgtaacgatggtgatgaaagaggtgcataatcttgatacgcttgatttatgtaaaacattgaatattactcccgggtatttcaagaagcgtattcgtgagataaaggacagacgttccaatccgggttactctccatatactcatcaagtatttatgacccagctttcggcagaagagtgtggagtcttccaagaaaagctgttcaagtttcccggtttctatattcagcggcgtactatccgtcagtataattacaattcggctgcccatgttctgggagatattgcagaagtgtccaagggggatattgaagcggatgattactatgtacgcggtgactttatagggaaacagggggtggaacgctcatacgaaaaacagttgaggggggagaaaggagtggagatattactgcgcgatgcccgtggacgtattcagggacggtatatggacgggaaatatgacaagactcccgttccggggaagaatctgaaactaggtatagacatagagcttcagatgttaggagagcgtttgttggaagggaagataggcagtatagtggctatcgagccatccacaggagaaatactttgtatggtatctgctcccacttttgacccaagattgatggtggggcgccaacggggtaaaaatcatctggaactggcgcgcgacagttggaaaccattgctgaaccgttctattatggggcaatttccaccgggatctacttttaagactactcaggcgttgacttttctgcaagaggggattattactcctcagacagcctattcttgctatcatggttttgtgtatgccggtcttagggtgggttgccactctcatgggtcacccctgcctttggtgcctgccattgcaacttcctgtaacggttatttttgttgggggttgtttcacatgataggggcaaagaagaagtatggttctgtacaggctgccatgaatacatggcgtgattatatggtttctatgggatttggttatcctttgggagtagaccttccgggtgagaagcgtgggatgatcccgaatgctgcttattatgataagaactatcggggatcatggaacggactgacgattatttctatctccatcggtcagggggaagtgacggctactccgttgcagattgctaaccttggggctactattgctaaccggggctactatataactccgcatgtagtgaaagaagtagaagacgagccgttggataccctgtatacgaccaaacattatactaaagtaagccgtgaacattatcagacagtagtcgaaggtatgcgttcggcagtattgggaggaacctgccgtagtgcgaatattccggggattgaggtgtgtggcaagacaggtacggcgcaaaaccgtggaaaggaccattctgcttttatggggtttgcaccaatgaatgatcctaagattgccgtggtagtctatgtagagaatggaggttggggagcaacttatggtgtacctatcggtgcattgattatggagaaatatttgaaaggagaactttcaccggaaagtgaggcgaaagcggcggaaatacaaaacagacgaatagattatggcatacacgaacgatagtatatggaaatcagtggactggatgactatctgcatttatctgatgctggttatctttggatggttcagtgtatgtggagccagctatgattatggtgaaattgatttttttagtttcgacactcgtgcaggaaaacaatttgtatggatctgttgctctttggggctcggatttatcctgatgatgttagaggataagttatatgatatgtttgcttacattttatatggaggcatgatgctgttgttgttgataacaccttttctggcagaggataccaagggatcttattcatggataaaattcggacctgtaagtttgcaaccggcggaatttgctaaatttgctacggcgttggctttggctaaatttatgaatgtctatgggtttacaatgagtaagttaaagtattcattgcctgtagtagggatggtgttgctgcctatgctgctcattattttgcaacgggaaacggggtcggctttggtttatctggctttcttttttatgctgtaccgggaggggatgccaggttctattttgtttgctgggatttgcgctgtggtttattttgtagttgggatccgttttggcaatgaattgatggcggatgactgtacttccatcggtgaattttctgtgttgctgttgatagtcattctttctgctttattagttaatagttattgtaaaaaagcatcggtagtgtggtatattggaggggttggtgttggtggtaccttgctggctttattattttcgttttatgttatcccttttgatattacttggtttcaatatggattgtgcgtagttttattgttctatttgatcttcctttctatgcatgaacgtatgcgtaattatttttatattgctctatttgcggtaggttcagtgggattccttttttctgctgattatgttttcaataatgtgctggagccacatcagcaaatacgtattaaagtggtacttggtatggaggaagacttggctggggcaggatacaatgtgaaccaaagtaagattgctattggttcgggaggcttatgggggaaaggctttttgaatggtacacagactaaactgaagtatgtgcctgaacaggatacagactttatcttttgtacggtaggggaagaagaaggctttataggttcggcagctgtattgtttctttttaccggacttattttgcgtcttattgtggtggcagagcgtcagcatactcgttttgcccgtgtttatggatattcggtattaagcattttcttattccatctgtttattaatataggtatggttttaggactgacccccgttataggcataccattgccttttttcagttatggggggtcttctttgtggggatttacgatcttgctttttgtattcttgcgtattgatgcagggcggggaaaacgttagagtttattggttttccagtttgcgcaactggatacctatatcactgattcccgtcaacgggttatccctcatgatatggacgatgcggaaagtacgtgtgcttccttctgtacggataggaataaatgctttataaggcagattacattgatataatccacaaagaccatttcctgttttatttccagcttcgtcaactagaaaaagttgtaaagtgtctgtgacgtaagtcaaagtatcctctgtgttatggctgactcctaaccaaatatctctgtaaggataagattcttgataacggatgccgatttctgcttcgtaatttccggcagggatagaattgggcagggtataaacaagagtatcacttttattccatccgtcaagggggacgggggtataagagtgatagattatattgttttgacaggctgccaatatgattattggcagccatgtcagtttattctttagttgatacaggagtttgtggcttttcattcggaatttggctattgtttccgttgttcttgttgtcattttccttccctcctccgttattccggttttcactgcctccttcattattaccattattggggcggcgtttattgcggttccggtttccgtcttcccgattttcacgactgcgttcttcccggccgcgactttccctgttgcgattttcttctttagggcggtttccgttctcttcgcgtggctgctgagccttgttttctttaggctctctaggttgtttgggacgtccttctctaggtggccggttttccttgggttgttgtgaccggttctctttaggttgttgcggacgtctgttttcattgggaatactttctccgttattaccgttattttccggcttacgttttttctttcggttgctgttgttgccttttcgtttatcgaatcgggttaagctttcttgttctactaaatcaacaggcttttgaggttcgttcttttttactgattcggttaagctttccggtttctcaccacgtcggttcatattaataatttcaaaagcacggcgtgcggtgatggttacagcattagctatgaaatttttgtcagtagagtacatgatagttcccttcaaaatatccgctttgaaaaaatagaatgtaccatctgtcgtttctaaagtcatttctttgcttggaaggcgtttttgggattctacataagcgtctacctcatagtttaggcaacatttcagtttggcacattgtccggctaacttttgaggattcagagaaatatcttgataacgtgccgcactggtagatacagatacaaaatttgtcatccaggtagcgcagcacaattcacgtccgcaaggtccgataccgccaatgcgtccggcttcttgacgggcgccaatttgtttcatttctatacgtacacggaaagcttcggccagtactttgatcagttggcggaagtctacgcgttcgtccgcgatgtaataaaagatagctttgttaccatcgccttgatattccacatcaccgatcttcatgtccaggttcagatttttggctatctgacgggatcggatcattgtgtcatgttctttggcttttgcctcctcgtatttttccatatctacaggttttgccttgcggtagatacgcttgatttcggcatcgggtttgatgtttgccttacgcatttgcaaaggtaccaatcttcccgtcagggttactgtaccgatatcgtgcccgggacttgcttctacagctactatatctccttttcccagcttcagtttgttgctgttcttataataccctttgcgggtattcttgaattgaacttcaaccatttcctgttcctcggtgttgccgggaatatcagccagccagtcgtaggtgttcagctgcttatcctgtcgtccgcagcctttgcaacacaaacagccgcttccgttctttaatttgaattcattgtccataattctgttttaattgagaattgaaaattgagaactaagaaataaatgccatgcaattctgttattttttaatactcaattctcaatttttaatttttcaatagcacaatcatttttaaagagaaatcaaagaacaccattttgggattcacattctgtcctatatgtaattgtgcttcactaagttcgtccattatgcccatcacattccgctcgttgacaaacggtgcaaaacgggtggaaaaattttgttcttcgggattcatatacactaaatcacgttgatgaaagttgtatatgaagttttctcgtatcatacgttggcagtaagccagaaaattcttctgacgttcacgccccatggaggctaccgcatcgctccattgtttcatttcgcgtatcttccgttgataggagagacgcatcaaatttataaagagttcaaagaacagtttgttctcctcactcaggtgtatggtttccagtgctttcagaaaattgccttctgagcgatgtgctatatcgtcagcatcttccggttgtaatccatatttggtttgcaatacttttgaaatctcaggttctttgatcccatgaatgttaaatcgttgggtacggctttggatcgtttgcaaaatggcatcaggctcttcggatactaataaaaagacggtcatggcaggaggctcttccagtaacttcagcagtttgttgctgcattccacattcatcttttcgggaagccatataatcatgattttgtaaccgccttgactggatttcaaactgagctttcgtacaatctcatcgctttcttttacaaagatttgcgcctgctggttttctgctcccatctctttcagccaatggttcagattaaaatatgggttctgcaggacaaagttgcgccagtctgctatgaaatcatcgcatacagtatcctttccggcttttttcttgataacaggaaaaacgaaatgcaggtcgggatgtatcagcttattgaatttcacacaagtggggcaaattccgcaggcatcttgttcaccacggttttcacagcagatgtaacgggcataagctattgccaaaggtaactttcctgtaccttcgggaccgcaaatcagttgtgcatgagggattcttccttcttttacctcggctatgagccgctgttttgcttcctcttgtcctattacatctttaaataacattgctttttatagtcatttatttactgtttaataaattgcttttgcaacttcctttacactgttcacggcacttacggtatagaaatgaatgctgggaacaccacaggctattaattcacggcactggtgtatgcaccattctatgccaagactttccgcttcttcatctgtttgacatttcatcgcttcgcttgccagttcctgcggcaagtctatcttgaacgtcttaggtatcatgttcagctgagataatttgcggaaaggcttgatacccggaataataggcacgttgattccttcttttcttactttttctacaaattcgaaatatttgcggttatcatagaacatctgtgtcacggcatattcagctcctgcttcaatttttttcttcagccaataaatatcttgttccatattgggtgattcctcatgtttttcaggatagcaagctactccataactgaatggagttcctgttatcttgataggggaaccgtctacaaatacgcctttattgaaatcattgatctgcgcttccagttctatggcgtggttgtaaccgttgttttcgggtacgaaagctgattcgtgttttgccttgtcaccacgcagtaccaacaagtcggtgatgcccaggaattgtagatctaacaatacatattctgtatcttcgcgggaaaaaccgctgcacaggatatgtggcactgtcgttatattgtatttgttctgcaaagcggcggcaacagcaactgttccgggacggcggcgctggcgtgtacgttggtacagcccgtttcccagctctttgtacacatattcgctgcggtgggttgtaatattaatatatttagggtcgaattcgcgtagcgtatcaaccgttttatatagtttttcaatacccgttcctttcagcggagggagaatttcaaaagaaaaagccgtattgtccgtgctttttattaaatcaactactctcatcgttctgtctcgttctcttatgccttctcgggcggaattacatatttgggcaaaaataagaaaaatatcgtagtttatggggatgaaaaagcgatttattttatctttgttctataataaagtgaaacatacggagagaaaagcatttccctgcagttaagccgtggttttccatacttgtcagggataccgtccgtgatggtggagtaacatttctcatgattacaggcattgttctcttagaggatgacctgtcaaactttactgcatggagaataagttgcagatgggataagtcccgtccttgcaggagatgaaacaatttgtaaacctttgtttggggaagtggcagaggtttataggaacggactgaacagattggcgaaccaaccgacgaagcgtttccatccggagcgttttttatattcttccttagtgagcagagtgctgtccagcttgtcatggtcaaacatggtactcagttcatgtgtggtttctttgtcaaaaataaaagcgttgacttcatagtcatagcgtaggctccggctgttcagattcgtacttcccacagtgcagaacaggctgtccaccatcatgatcttagagtgatggaacccgccattatacacataaatctttgcccctttcttacgcagcttgtttgctgtatagaatgcggcgtcgggggtaaaaggaatatccgatttgcccggtatcatgatttctacttcaacacctcgcttcagagcccgttttatggcttttttaatgcttggaatgggagtgaaataagggttcactatttgtattttatcctgtgcggcatcaatggacttgatataagtctgcctcatcagtttgggctcttttttcggaatacggtctacaatagctacattcttatttcccttgaaagtagaatcgtttcgtaggggatagtattggcttccgcttatgtgttgtttagtgcttttgttccacatagtcaggaagatgttctgcaattcgtttacggcatttccctctatacggatatgcatgtcacgccagtcgcctatttccggcagaccctttatgtagtaattggctatgttcattccaccagtatatcctatttttccgtctatgactacaatcttgcgatggtctctgtgcagggcatgattgatatagggaaatttgaaagggtcgaatttgacaatttctatacctttgtcacggattgcttttatgtgtttcttttttaatggcttgttgtttgacaagttgccgaaggcatcaaataaagctctaacttccaccccttcttttactttctcccccaataaatcaaatagtgcgttcgctatggaatcgttacgaaaattgaagtattctaagtggatatgatgtttggcatgccgtatttcttcaaagagatcgatgaatttggcccgaccgctttttaataatttcagtttgctgttttgggtgataggaatgccggcgtcctttaagaagttgataacggcagagtcgcttgtataggctggtacagtatctgttaccgctatatggatgttggtcacttcttgtgactgcgctgtttttacagtgaagggtaagatgaataaaagtattaaataaatatgtttttttatatcaaacttcattgttttttttattaaggctgcaaaggtatttattattctaggaatgaacaagccatcggtattatttatgtttaaaagggagaaatagaacagtgtggtcattctgtttaaacagttgataaattgggcggtagaaatttaatggagactgctttttattattctattcatatctttcttcaggttcggtataaacatctgtagtgtgtgtgaaagaagtttgtcagtccggcctttctgctgttatgacattcaagaggaggagatactgaaaaaaataataacctgtcagcgggattaaaagaatgcatatcgcatctccagccctgttgcataagccttttctgtcttctgattaaacctttttatacggatgtattctatctccatagcctttggaattatctccataagctttggagttatctcccaaggctatggagtttactccaaaggcttgcggagataaaacacacgggaagaaaacccttaatcataaggtaggaaaggtctgaggatacatataaaatcttttagtggcgaatctgatgtatgtgcaggccatacatacattatgttcattcttatgtgtatgtatatgaacttccatacgtccagaatgaaattccacatcagaaacgggggtgttttttatctttgccgacgcatcgtaagccgtcattccgtggaggtacaaatcctttatggtgctttttacgaggaaaaagttttggaatgctctactttgtatcaagctggaatagtttataaaaaagagaatatataactgataaccaatatgctatgagaaaattatcttgaaaatgtagtgagggcatgagagcatgaatgagagtaagtatttttacattgatgtataagtggtttataattagcttgttatgtttgttgtgagggcatgagggcataaatgtttcaaactttctagtgagaaagactggtgcgtcaagaatattttgggaaactgacccggaaaatccattcttggtttaaccagtttaattctgatataaaaaaagagagttattttgatgtaactctctttttttcttggtgatccgcttggggctcgaacccaagaccccaacattaaaagtgttgtgctctacctgctgagctagcgaatcaatcctttgttattgctattcttccgaattgcgagtgcaaaggtagactttttaaatgaaacatgcaaatatattacctgttttttttgaattatttctctttggtattgcttatttgttgattgtcagtcgtttttgtactttcggaaaattctttttcttttattcgtatatacctttgataataagagagcattaaactggtacaaggtagagcaataatcattcctacaattcccattaacgctccccaaacagagagagataataggatgatggcaggattcagacctgtaatttttcccataacctttggtacaattaggccatcttgtatgatttgcacgatacagaataccaaaaaagcgcaaaataatatccaccagaaattctctcctgtatccgctgctttcagtagtgccaataagacggtggggatgaaagcgatgagctgaagataaggtaccatattgagaagtccgataaataaaccgaaaccgatagctaatgggaagtcaataataaggaaacctatactgaatagaattcctacacaaaaggcaacaaatgcctggccgcgaaaatatttgttcattccatcttgcacatcagtaacaatgcgtattgtcatttcacggtgtttgataggaaccagtttaatccatcctcgcgcaatggcttcataatccaataaaataaagaaggtataaagcaggataatgaatgaggtaaatacgctgaccacaatattgacggattgggtcaacaaggtccatacttgtggaagcacattacgcatagtatttgcgaagttgttttcgttcagtgcttcatgtattttcagcatatctatatgttcttttatgaaattggccacagtgccgggaatagctgcttgcttggaaccttcgataaaatattcggtaagcagttctttcagcttgccgaattcttcaatgataggtggaacaagtccgataaatgctagtgtgataatggataataatactaataaaacaacaaatatggagataacccgattcttcagacgcagtttatgctggaagaaaataaccatcgggtagataagataagcaataagccatgccacgaaaaaggggagtagcactccgctaagctgatttactaagtatagaatgccgataatgacaaccgctgtcaatattccacggataaaactgtcgaatgttatttttttctgcagcataaagcatatgttatttattttcagtttcttctttcaaggactccatatagcaggctcggcaaagcggttcataatcagccttttctcccaataaaacccgcttgtcacttttggtgattcgatgagtggcataggctagatttccacatttcacgcaaatggcgtgaactttggttacttcatcagcgatagccagcagggcaggaataggaccaaaaggaattcttttaaaatccatgtccaatcctgctacaatgactcgtatgccattgtcggccaactggttgcaaacatcaaccaggccttcatcaaaaaattgagcttcgtctattcccactacgtctttgtctgatgagaaaagtaggatactggcagaagaatcgatgggggtggatgcaatggaattactgtcatgtgatacgacttcttcttctgaatagcgtgtgtccatggccggtttgaatatttcaacccgttgacgggcaaatttcgctctttttaaacggcggattagttcctcggttttacctgagaacatagaaccgcatattacttctattcttcctcttctacgcgtttcctgaatgtggtcttctgaaaaaactaccataattttgatgtaacaatatagattaattttaggtacaaatgtacgatttgtacctcgaaaaaggactattttcactcggaaatttattaataaaagatataatgttaaactaaagtgcaacatctgttaaataatggaggcaattaactttattcatttaatttctttctacatttgttccattataacagaatgcaattgttttatgggaaaactgtatgtcgtacctactcctgtaggaaatttagaggatatgactttccgtgccatccgtgtgttgaaagaggctgatttgatattggcggaagacacgcgtacttcgggcattcttttgaaacattttgaaattaagaacgccatgcagtctcatcataagtttaatgagcataaaacagtggaaggtattgtgaatcgtatcaaagcaggcgaaactgttgctttaatatctgatgctggaactcctggtatttctgatcccggatttttgatagtgcgtgagtgtgtgaagaatgacatcgaagtgcaatgtttgcctggagctactgcttttgtacctgcgctggtggcgtcgggattgcctgatgaacgtttctgttttgaaggattcttgccacaaaaaaaaggaagagtgacccgtttgacttctttacaagaagaaaaacggacgatgatattttatgaatcaccttaccgtttggtgaaaaccttaactcaatttgccgagtttttcggtgccgaaaggcctgtttccgtatgtcgtgagatttcaaaaattcacgaagaaagtgttcggggcacattaactgaagttatagcgcatttcactcaaaacgagccgcgaggtgaaattgtaattgtactcagtgggaaagaggactaaaaatgaataaacttaaaatgtaaagcaaatgaaaaaactagtatttttatcgttgttatctgtagctttattgacttcatgtggtaatggagctcagaaagatgccttgaaggctcaaaatgattctttgatggtggaactgtcaaacagaaatgctgaattggacgatatcatgggtgctttcaatgaagtacaggaaggttttcgtcagataaatgaggctgaaaatcgtgtagacttacagagtggttctattcgtgagaatagtgctgataagataaaagaagatattcgcttcatcagtgaaaaattgcagtcaaaccgtgagcagattgcgaaactggagaagcaattgaagaatagtcagtataattccgctcagttgaagaaagctgtagccaacctgacgaaggagttggaagctaaacagcagcagattgagactctgcaggctgaattagcttcaaaaaatattcgtatcgctgagctggatgatgctgtagctggtttaagccagaatgtaagtgaactgaccgctgaaaatgaagcgaaggctgcaactgtagccagccaggataaagctttgaatgctgcctggtttgtttttggaacaaaatctgaattgaaagaccagaaaattcttgaaaaaggtgatgtcctgaaaagtgcggactttaataaggattattttactcagattgatattcgtactgataaggaaatcaagttgtattctaaacgtgctgaattgctgactacacatccggtaggttcatatgaactagtgaaagatgcaaaagggcaactggccttgaaaattacaaatcctactgaattttggagcgtatcacgttatcttgttattcaggtgaaataagagaatttaaattattgttttgtgaaagggttgtgccgtgagtgacgcaacccttttttaatctgctttatgttgtatgtatagaagtatatttattgatttggatgatacagtatgggcttttactgaaaacgctcgtgatacattccaagatatgtatgataaatatcattttgatcgttattttcgttctttttctcatttttataccttgtacagtgggaagaatgaggagttgtggaatgaatatggtgctggtaggattacaaaagatgagttgaatgagcaaagattttcctatccattgttgcaggtaggagttacagataaagcgttggtaaaagcctattcggataatttttttgatgatataatttacaagaagaaactaatgcctcatgtaagagaagctttggaatatttggcatccagttataatctgtatattttgtccaatggattcagggaattgcaggaacagaagatgcgttctgccggtgtggaagggtattttaagaaaattgttttgtcagaggacataggagtacataaaccgtttccggagattttttattttgccatgtcggctacacagtccgagctacatacttctttaatgattggagataactggaagaatgatgttgaaggtgcgaaaaacgtagggatgggaaatgtttattataatataaaaggtgagaggggcttgccttttaaacctggttttgatatgagggattggcaggatatcgcttctttcttatgaaattgaatggaagatgttgatggataattctgttggcacaaacaatgtatttgtataaggagtgtcaggtatttgtttcaaagggatgctcctgtgtattggaacatcccttgataagcatttttttctttcaactccttcctttaaagattatttgagaattagcggagttgaatttttatttagtaacctggattttgttgagcttttaaaatagggttagcattgatttcactgacaggtattggtaaaatcgctctaaaataagaacggtcgaatacttgtgattctttatttatagaataatgccaacctttctcatcttcattggtataacgtgttattgtttcattattacgcatggcgtcaaagaaacgttgtccttcacctactaattctttacgacgttccaataagactctttctagagtagcggtagactctgtaactaattgttttgtatcatctgtacggtttttaataatttcattcagatatttaactgtagaagctttgtcattcaacttagctgcagcttctgctgcatttaaatacacttctgacaaacgaagaataggtaaattgtttaatcgcatatcccctaaacttcccattgggaatttattgataaagatacgattgtctccataggtcttatacatatcggtcggttttccactgtcatctgttttcaattgtaccggcagaatcacatccaagcgaacatcacttggatcttgagctaacatatcaacaaatgattttgtgcaaatagcatcggcatatccatcttcatgatataaatatgcaataccttcacggtctgcccagtcatcagagccgctattgacaagttcaaaaatcatttcattgatatgattggcgttgtttttatcccaagcgtttgcatattgagcctttgtccataggctataaggagaattttcgataatgttttttgctatatctaaagcctcctggtttttacccatgtatatatacacgcgtgtaagtagagctttggcagcccattcgtcaataaatccttgattgtctccagctgatttagaaacatttaaggctttggagtcaatggcttcggttaaatcttttacaatttgggcatatacttcggccactgtattacgtccgggaatagcactggcattcaaaggatctatcggggtggtcacaatgggtactcccattgaagctccataatcaaaagaataaggcataccatatacttttaccaaatcaaaatgtaccaaggcgcgaacagattttgcctgtgcatagatgttgttcacatttgcctgattcttttcggcatctgttattttgttattttctacggcttctatcaaacggttggcacggcgtaatacattgtattgtacattccacatgttgggagcatcgtcaatggtgtatttcatttcgtaacaactggaagagcgcattccttgtgtacgtgcctgcatgtcatctccccggacgtcaccatagtaaaacatacgtgcggcataatactgtgtataggtagagtttccctgcagaccatcatacataccatacaaagcggtttttgcatcattgtaatttgtgatggcagaattactgggaatactatctgatggtgtcagatctagccaatcgtttacacacgaagtcaatgcaatggttgccatcgtgaaaactagagatttatatatttttttcattttgttctctttattttttagattatatgttgaataagatttctggataatggaattttaatatcctgtttcttattctgtataaactttataattaataaattagaatccaacttctaagccaaatgtaatggttcttaaagccggtgtttcaaatgtacatagtccatcaacgggtgtttccggatcaacatataaaccatctgatttccatgtcaacagattgtttgcagaaacgaaggcccttaatttgttgattccccacttttgagatactttggaaggcatagtgaaacctaatgtgatatttttgatgcgcaaatgatctgtagacatcaaccaacgagatgatgcgatattagtatttccatatgcaaactgaggtaatttagcattatcgcccggttttttccaagtgtcttctattttgtaataagcaggtacgttacccaaataattatatgtaccttcgttagattgcaaccaagtcgcatagtcataagcatggcctcctaatgagtaggttaatgtcatattgaaatcaataaacttccagcttacaaagtttgtgagaccaccctgtacggtaggttcaactgatcctatgattgttttatttgcttgtgcggagttggtagttgtctctctgcttccatcttctccgtttatataatataattctttacctgttgcaggatcaactcctgcatattcataagcataaatagaatagtatggttccccaatacgatgaatggatacaccgctaatcatttcgttctgttcaccatccaactttgttaatttgtttttattgtggctgatgttgaatgtggtagtccatgtcaaattgttgttttgaatattcgttgatttgatttcaaactcaaatccccggtttctcattgagcctacattcatcaatgtattagcaataccactcccgtcaataatgccgggtacagcagatatagctctatccatcaacaagtctttagtttcacgattgtaccattcgaatgttaaagccagacgattccacaaagttaagtccagacctatatttgttgcatagttcttttcccatttcatattaggattctcgatacgattttctgcagaaccagctcctttattataattgtatccaaatccgaaaacacccaaataaccataataatcagatggctgtgtaccatttacaccgtaagaagcacgtaacttggcatcagtaattacttcttttatattttccatgaaagattcactggtaattctccacgaaccggatacagaccaaaaatcaccccatctgctttctctagataaacgtgaacttccgtcacgacggaaactggcactgaaataatatttattttcataatcatagttcaaacgtcctagaaatgatgtcatacgatatctttgtacactgctggatgcacgggtattacctgcattttctatttccggcagataagatggataggtgtttccgttagcatatacataatcatatttgtaatcttctgtttcaaagccaattaaagcgtctaaagtgtgcttttctgcaattactttgttatatgtcaattgagtttgggtattcaatttcgcacggtttcccataacacgctggtaaactccattagaagaacgtccgtcatttgagcggggatcccaccaaacacgttcattgttttgattgaaatcataactgactacctcttttatgtttaagttgtcccaaatgttccatgttgcagaaagagaacctaaaaaacggtttattgtacttctgttataattataggcttctgtttgtataggattggcaccatttaatgccgggaagtttgtgctgaaagaaccatcttcattatacggatatgtagaaggagaggcagtcattgcatagcacatgatggggctggcaaaactggtcccttcgttgtttacgttttgagtggagttggtaaacattgtgtttgcctccagtgtcaaacgattggcttgatgagttacattggcacgtccggtaaagcgttcatagccggaaacgtttgtaataccttcctgtttagtataagcaaaggaagtataaaaacgtgttttttcgcttcctccttgtgcgcttacttcataattttggtgacttccgttgcggaataagacgtctttccagtctgtataacccgaccatggtcttgcggcgaagtcttcaatattcttatctgcgaaggcttttgcagctgcttcgtcattaccattgtttaatgcatagtttgcaagtcccagatgtagtatttcacgtctgtcttctccatttaagatcggacggtagttaatggccatgttggaaagtccccaatctgctcttaaattgatttttgtcttgccggatgccccttttttagttgtgataacaattacaccgttggcagcacgagaaccgtaaagtgatgcagcggcggcatcttttatcacggtcatagattcgatatcgttgctgtttaatgtagccataaggctgttacctgaatctgcgtatgagaattcactaacattgccattcagcatagggactccgtcaataacgtacaatggctcattgctggcattgatagaacccataccacgaatacgtacagaagcgacagctccgggttgtcctgaagttgatgtaatttgtacaccagatacagaacccgctaaacgatcctgaacactaactgtagggatatcttgtaatttctctgttgatacattagaggctgatcctgtaaatgatgattttttgaaattaccatatcctgttactaccacttcttcaagcacttcggcatccgacttcaaagtaatattgacagtctgttttatagccacttcttgtgtagccattccgataaaggaaactaccaaagtctttgcagaactaacaagacacagaaagtgcttataatcaaaagattaaaatttatcgattctctttatttactctgcgggaattactttaaacaaagttatgataacctttttttctacttttgttctacctcaaaattactttatacgataaaaaagtctaattgtgataaatctcattataatgattgtattataataagattataatttttttgcaaaaaaaatgcatgaaataatgaaagaggaaatccaaattggaatttagaaatgggagagagcaaaaaacgtctgttactttggacgaaatacttagctatctaggaaaagcagacaaaatctgcctagtagcgattgactaatttcaagttatcgctcaatatccgggaaagaacgttaaagccattttgagcatctatatataacattgtacaatgtccatttatatatttatgttcacaatgtcatatgacgggagaaatttttataagtcttccggcttttttatcaaagtactatgattttggatttacaatctatcagactgaaagaatatacaaaatttgttacacaccatttccagaaaaacgggaagtacattaataaaaatgttatatctgaaatatatcaactgtttgacggcataatatgctacatccggtctatgatcgtttttttgagttttggctgagaagaacattaaaaaaactgatggaagattccgtgtgtaatcaaaatttgacttcccgtcaggagttacaatcagttcataaggattgatggtggtttgttgtgttccttccaaatatgtaactaaatatttaacatatatgtctttacaagcacatttatatagtaatcgaattcgagttaacagatgtttatcaataatttctaaagaccgatttactatatagatttacccaagtatacattaattttgtatacttgggtaataatttattggataattaaggagaaagcttcatcttttcctcatatcttaaatctaaattatttagcaggtaggtaaagtatttctttaaattcaccaaaaccaccaacattgggtacatcatgcgacagcttcacagtaataaccccgtcttccaaagcacctttgcctgaaacaaaaacttctccataggatgcgtgcttccatgccggctgagattctacagtgacctcattggcttcattaactttgaagacaatgttatatcctttttcatataagttcatagctttataccatgatatctggtctgctttttgaacttccacttcccaagttgcaaaatcttctccttcctctgccatagccgcagatttaaatgttccagttcctaatgaagaaaaagtataatccctataaacagttatgactttatccgaagtctggtctatcgtaaccatttcctccggcaaagatatcttgactttataattctgtccaggagttatatctccaactgtaacatgaatattggtcttaaattcccctgctgcgaatgaaaccgaggaaggtacggtaatggaggcagggagttcctgctctttatcaccgacaactaatgttgctgataaattaattgtagtagcttccgaagatttcgcgcgtaagacttctacatcaaaaccctcatatcctgtggaaggaaaggaaaccgattgtgtgcctgtggcgaatgtcacccccattgttgtgctattgtatatatctccttcattgtcggtgttgcacgatacaaaaaaagttgcagtggcaacaaacatgccgattatatatttatttactttcataatttacttgcttacagattaatactatttatgatcacctatcggattctgatctttgctaggatccatgttcggattaccatcaaattccgtttgaggaatagttaatacccatgcatacgactcaggatcttccgtatctgtaccagcaattaaagcactggatggccagcccatgtctgcagtacgtctgaacccttgtttcagacggcgtatatcatagatacgtccaaattctccccaaagttcaatacggcgttgaattataatttcttcaagtaaagaaccagtttcatctgaggtgagcttacctaatgccgttcctgtttttttgcaagtgtaatcctcatcacgtttttgcattaaactgttcaacatcagttgtgcgcctttgtcatcatttaaacgacaagatgcttctgctgcggttaaaaacatttcctcaatacgcataaaaatatagtcacccgtccatttcgcataatctttaaacttgaatttttcttgttggtaaccattcttttcattattctcgtcttgtggattccaccattttttgcggacatcatttgtgcctagctttgcataaagcagtttgtttatttgttttcgagcactagctccatatttcccttgatccgcatccatgtgtgtaaagaaacctgcatacattccggactggtcggctatgatttcggccgcccacatcacattattggcagtagcatcattcattccaccggttaccgcagttccagtgccgatactacacccacttttgcttattgcggcattcgcggcatccaaagcggtctgccagtcttccatcactaaagcgacacgagcctttatacctgaggcaacagcctcattgatatggctgatatgttttcttttacctgagttgcccagcatggtaattgctttgtcaagatccgaagtgatttgttgatatacttcttcaaccgttgcgcgccctttaccttctgttgcaatatcagtcggttctgtatagagtggtacacaaggttcgctttcatgtcctttataagtgcgagaaaacatttgtgccagcataaaataactgtaagcacgtacagcgtaggcttgtccaagcacataattcttttcggtttcatttccagacatggtttcctcttctgccaaaatgtaattgacattagaaatccaagtgtaatagccattccacatatcataagaacgccatccggtagaggtatatcttgattttacgttgtaaacgcaatcataccaaaaccagccgctaccttgtccgttcataatgcaatcttcacccataacatctgccaccagattataagctgtgataccgaaacattgatgagtgttagagctgtttgaaacccctgctgtatacattgctcgatatacaccattcaatgatactaatgcattagttgctgttcctaataattcgttgccagaaacagaagatgaaggactggtttccaaagcatcctcactgcaagctaccacagacattgcagccatcccggcaaatatgtatttaaatatttttttcatactttcctgtattcttttaaattgttagaaattaatttcaaaacctactgaataagtcttgttgggagcataagaatagtctgtttcgcccttgaagttatactgtgggtccataccgtccaaatgagaaaataaagcgagattatctaccgatccgaatatgcggacagactctagcccggccttctttagccattgtttgggaatagtgtagcccaaagtgatatttttgatagcaaagtatgaagcatcaactaaaaaacggtctgaagctgtgtaggaacctccaatttgaatacgaggtacatctgtgatgtcaccaggttgttgccaacgtctcaaagcatgtttgttccatgtattgcctgcatacataacttccatagaaccagcgtataatgaatcataaactttacctcctatagaatatgtacccaatattgacaaatcgaaattcttgtaagagaaatcggtattgatactaccatataaatcaggtatacggctgccggaataatatttgctgttcgcagctttttgatagtcactgctgatatattcgttagtgatgttgccattatcatccttatcatatacccaatagagctgcgctcctgttgcaggatccacaccggcagatttagccatataatatgtattaataggcattccctctttaatactgaaaactcccttgataatttcaggagattccccagttagtttcagcactttattggttacagtagagcccatccaagttaagttccatataaaatcagtggttttgataagggaaccacctaaactaaattcaaacccggtattacgcatagaaccgatattcgcattgtattcagagaatccactagaagtagccttagggtatcccagcaacatatccgttgttttgcggttataatattcagcactaacattcaagcgtccgtcaaacatacttgcctcaataccgacatttaaattaccgcttttttcccatgaaagttttttgttttccaaagcaccgatcagacctcctacttgattggcattcggatattccaatggatagagtccttgccaaggataataatccggtacatatcctccttcaagactatcatatcttaacagattatcattaccttgttcaccataactgattttagctgataaattagaaatccaagtcaaattctgcataaacttttcttgtgaaattctccagttggcaccgacagaccagaaagtaccccaacggttatctttttggaagcgtgaagaaccgtccgtacggatagaggctgaaaaataatatttttcattaaagttataattgaatctcccaaagaaggattccacacgataatcttccgaatacgagtctgcattgtatagatttgtacccggacgcaattcaagaataccatctactaaattggtttttccggcagacagaaattcatatttgtatgcataaaattcatgaccaaccaaaagatcgatgttatgaaagttaaaagaacgcccccatgtcagtaactggttaaaagtataagattgggttcttctgttatatttcatcaacaaaccgccggcagctgcctgattaccatggtgcatattcatatatgatttttgagatttgttccggtagtccagaccaaagtttaaagtcagcttaatacctttagcccatccggcatcttccgaatctgagccgaatgccaaaaatgtgcgcaaaccggctacatctgtttttatatcagccttgtcatctaccaaaccgcctacgggattgaaatcactatactgtgggcgttgtacactaccgtcaccgtagtccagttggcgatttccatcggcatctaatacatctttaccatcttctccctttatatacaccgggtaaatcggagccataaattgtgcagagtaccacacatttgaattagatgaaccttcgtaatcactgaaattttgtgtggaattggaaagtgacacattcaatccagtcttcatccatttattcacttctgtgtttatgtttgcacgggcattataacgttggaaaccggtattaatcaagatgccatcttcatttaaatatcccaaagagaacatatatttggtcttttctgtacctccattaacagacaactggtgttcatgacgaaatgcattgtctctttgtattgcatccatccaagattcattccatgcggatgtagcatcaccctgcactctacctgttgcaggatctataattgttccccatgtgtaatttttaaatggattatattgttctccacctaaaacgccacctaaatctgctgatgcttgtctaccggcagcttcccagttatatccattgtcaaagatatatccgttgcgtaaaccttcatacgttaactgtacaaattctttttggtcaaccatgtcataggctttcaaggaacgtgaagaccaacctgccgtagaacgccaagataccttagtcttgccttcttttccttgtttggtagtaatcataattacaccatttgcaccacgggctccataaagggctccggctgaagcatcttttaaaactgtcatgctttcaatatcggcaggattgatagaactcatatctccactaaaaggtattccatcaactacatacaaaggatcttgtgaggcattgatggaaccgtaaccgcgaatcacgatcttggcagcttcgccaggttgacctgagcctgaagttgttaacagacctgtagtctgtccttccaatcctttagtaacattacttataggacgtaattccagtttcttattattaataacggatgctgatcctgtaaaagattccttttttgcagtaccatatgcaacaaccatcacttctccaagcactttagtatcagattttaaaatgatgctaacattctgtttgatagaaacctcttgactagccattccgataaaggaaaccaccaaagtctttgcagaactaatcagttatttaatttattgataatcagtatttaatacactaaagtcttatctgtttttctttatttaagccattctaagagtatgaaaataattgttttctacctttcttctactgaaagaaataatagacgtataacattttgtaacactcaccgctgccctgttcataaaatgaaactaaatttattatcttcactgaaaagatatcgatagcccctaaataacataaatttgttcttaaaagagccccttatctttgctttaaaacaatcttggctttttaataaagttcatcctgtataaatagaaaatatgtgcaaaaagagtgctacgaaaattttcactattaatagaaatattcttttcaagctaataggaagattttatatcgtacagagttacacattcctaaatatacaaaatgatattataaggttacatgtttttctaatatatgagtttatacaatactaatctatgaataacaattaatattaagttgtatcattatatccatgttctcactttttgttttttacataatattctaaatctttgttttacagaacaatatgtatacaggtgtataaatatctgttttagtatccttctcttttcccgtttctctacaaaaagtgaggtaaacgagagcataatccacataactttatattaaatcaaatgaagacaaatattattagtcaaaatggctttgattagttttattcttgaattctaatttatccattttaggtctatttgttttaagctatacttgtatattacttaagttacaatttgattctataattattacaaaattattaattctgtaattcgtatatatattatatagatcttaagaatgtcctacaatttctaagcattgagctttaagtaaagtttttggatggatagcctatatctttcatttatgtattgaatgtattgccaaagttgatatttcttggtctttttatattttaaggcttccaaaagattgtttgctcttcgaattacagaagaaaacagggggcataaagtaaagtggcaaactattatcatcattttccgatgcaaaattttatatatgaatattatatggtatacatatatgattcttgcagaaattcaagaactttggtacctattttctacccagttatgccaagatatgaatattgtcacattttatttcttttagtttatcgtattgcaaccacaacaaaaatttatcatgttcacaaaacgataaactttattaagaagataagactacattcacttatgaaaatgacccttcctcgtctttataagaaatattgtatagacaatagagtttactaccttttttgacatttttttagatctcgtacgattgtacttcccattacttctccataaatttgtgttgtagcaagatttttatgtcctaacaatttttgtacagttgttatattagcacctttatatatcaataaagtagcattggtatgccttgcagagtggaatgaaaagtgtttgtttattctagccaatttaccaattcgtatcaattctttatttacgcttgaattattttttattgaaaaaaaagaactccattttccttggtatttttgtaacaaagttaaagctttaccttcaaacaataaacttaaaggcaatttcacttctgcaccagttttgacagagtcaaagattagccataattttccatccatttttacgatatttttctcatttaagcttacaaaatcagaataacgcaatcccgtatagcagcaaaataaaaatgcatcaagagtatgttccaaacaactatttcttcctatcaaagacacttcttctaattttttcatttcttccggtaataaaaaaacatgctttccttctttcattttaattttatatcttctgaaagcatagttattaggatcgatgtatcctttattaattgcagcattaacaaaagatttcaaatgcttcatgtgtttagctactgtatttgtttgatagtcggaatcataaagaaatttttcaaaatctgtaacgaaattataggttaagtcttcaaactcaattgtcggtttgaacgattgtaaaagggatattgtcgttaaatggttacgctttgtgctgtcttttagctgagaagacattatttctttacgtgcaaaccctaaaaatgaagcatctgtgttcgatttgaactcttcttttatgaggcttaaggttattgtctttccttgcctccacaaacttaattctttcttttctaattctataataaattcattaagcatgccattcagcgcatcttgattaggatgctctttaataatctttctttttacatcccattgttctggtcgtaaataaacatgcgtagaaaaatacactttctttttattcaagtaagcttcaacttgaactaaagcagttcctctgtcatttaaacttttttttcgattgtaaacgaaacgataactgattttcctcataatttaattctttaaattgaaattctataataagacgcaataaagaaaagtagaaaagcattattctgctattttgttctcatctttatatttattaggcgatttgttaacgtttataggttaatgtatgtttatatggtcagttataatttgaaactctctttttcttacgacttaaaaaaaagaataaatatgaggtttattttcgttttttgtgagttttaaatgcccaaaagcataaaaatatagcagtttagtatgatttttacaataatttgtttgagattacaattttattcatacctttgcaatttgttagagtgaatgaatttatattaatgtaaagttaaactttaagagagaattttatgaaaagaaaattaatgctgttattgacctgcctttttgtaggtataggtttggtaaccgctcagatcacgaaagtaacaggtactgttatttcggaagaggacggattacccgtagttggcgcctctattttagtaaaaggtaccactgtaggtacagttactgacatggatggtaaatttacattatcaaatgttccaagttctgcaaagactttggtggtttcctttatcggaatggctacacaagaagtggctataagacagactgttaatatcactttgaaatctgatacagagatgcttgacgatgtggtggttatagcttatggtactgcgaaaaagtcgtcttttacaggttctgcgactgctgttagtggagaaaaaatagcaaaaatgcaggtttcttcagtttctaaagccttggaaggtgcagcagcaggtgtacaagtaatcaacaccagtgggcagcctggagaaaatgctaaaataagaatccgtggtattggctcttttagtgcatcgtcggctcctttatacgtagttgatggtatgccttatgatgaagagtctgttaatgcattgaatcctgccgacattgaaagcatgtctatattaaaagatgctgcatctgcatctctttatggttcacgtgcggcaaatggtgttgtgatgatcactaccaaaaaaggtatggtagataaatccaaagtaactcttgatgcacgctggggagtaaatactcgtggtgttccagaatatgatatcatgaaagatcaaagagaatacgtactaacagcttggaatactttgaaaaatcaatctacaggtgcagaagcttccgaaggattaataggtagcattgggtacaatccattcatcggtgtagctaataatgccatggtttcagcagatggtgtagttagttctgcggctctccgccataatgacgattgggctgatgccgcattacataatggtatgcgtcaggaatataatttgagtctgcaaggtggtaacgctaagacaactcattttttatcattgggatatttgaaagatgaaggaattttaaggcatactgacttcgaacgtatttcagcacgtgccaatattaatcatactgtaaataagtttattgacatcaatggtaatttggcttacgcaagagcggaaaaaaatgcaggccagtcacaaaatgctagtttgtctaattactctaatgcctttatgttcactcagcaaatcgctcctatttatcctgtatatgcgtatgacgaaaacggaaatcgcatatatgacgaagaaggcaacactgtttatgattttggtgatggtacatatagtacacgtatgggcggtttcagtaatcaaaatgttgcagctaactctgggttggatgtgcatcagactttgaatgacaattttaatggccgtggtactatcaacattaatattattgatggtttaaaagcgactgctaacattggttatgatttaatgaatcaaatccgtacagaccatatgaatcagttatatggggatgctgctaatgtgaatggtcgtacttataaatataatcaacgtattgaatcgtttacagcaaatcaacttttaacttatagtaaagcatttggccatcataatattgacataatggctggtcacgaatcttattcatatacactgaaatatcagtatactcataaatacaatttttatactattggaaatcctgagttcaacaatgccataactatgagtgatatgaattcatatacacaagaacatagtatggaaagtttctttggtcgtgtaaactatgattttgataacaagtattatctatctgcaagtattcgttcagatgaatcttccaaattccatcctgatcaccggcgtggtactttttggtctgtcggaggttcttggagattaacacaggaagagtttttgaaagatgtggaatggttgtctaatcttaaactaaaagcaagttatggaacacaaggtaatgatggaattcttgatataaatggttatgtagtctatcaaccatatttgaagcaatattctgtaaccaataataacggagatttctctgtagtcgaaacttatcgtggaaataaagatttgacttgggaaaaaagcaaaaatttaaatatcggtttggaagctgcttttcttaataaccgtttgaaactagaaactgaatatttcttgaagaagacttcggatatgttgtacaatatgccttatcccatttcttctggaatttcttacgttccaatgaacctgttggatatgcagaataaggggattgaatttaccatttctgccaccccaattcaaacaaaagattttatatggaatttatcttttaacggtacacactatagcaataagattttgaatcttccagaagacaaaagagagaatggaattattcatggtaccgcttctttgttccgcttaatggaaggagggtctatttatgatctttatacgtatgaatatgcaggtgttaatccagagacaggagcggcacaatggtatatggatgagaaagatgctaatggcaaggtgaccggaaggaccgtaaccgaagactatactcaggcaagcaaatatgaattaggttctactttgcccgatttccaaggaggtttttcaactgattttgcatacaaaggaatcgatctttctatagctacaaactttcaaattggtggaaagatatatgacagcatgtattcttctttcatgcatgcgggaagcaatattggcagcaactggcataaggatatcttgaatgcttggactccggaaaacaaaaatacaaatgtgcctataatggatggtgcgcaaaatagtaatagccaatcctcacgtttcttgataaatgcatcattctttaacatccgtaacatttcattaggatatactttcccgaaagaatggatgaaagcaatatcagcaagcagtgcacgtatttacgtatctgccgataatgtagctttattctctaaacgtaaaggtatggacccccgccaatatgcttatggatattcggctgccaattattctgcgattcgtactttatcattcggcattaatttgaacttttaaaagaatagaattatgaaatatacaaaatatttagcaatattggctgcagcgtttatgatgggatcttgtagcgatgactttttggacaaggaaccttcagaaaatgcatcagaggaccaaattaaagatttgcttgataaagatcctacagctattcaagcatacattacaggatattacaaaaatatgttttctccggaagcacagcaaagtcatgatgatttcgggttaaaggcatttgaattggccacagacttgatgggagatgatatggcgtatatgacttcacacttcttcgtatatgattatctgcttgacaaccgtgcttcaagttatcgtcgtactaccacttactggcaagaattatatgctgtaatcagtggtgcaaatgaagtaatcagcggtctgaaagaacaagcggacagcggtgatgagagtgttgagaagatgctgggacaaagttacactatacgtgcttactgctatttttggttaataaacatgtaccaacaaccttatgaatggaataaagataaattaggtattcctatttatactgaatctgaaaccaaattgaatcgtgttcctgtaggtgaggtctatgaacagatattaagtgatatagataaaggatataattatttgaaaggaaaaggaatatccaagaaagatgaattaaatgaatatgcagcagctgctatttatgcaaacattctttcatttgttaatgattatcccgatcaatggaatgaagttgctaaatacgcaaaattggctattgaaggtggctcactgatgagtgaaaaagaattactttccggctttaatgacctttctttgagcgaagtgttgtggggggctgatattaatggtgaaacgaatacattctacgcttcattcatgagtcaagttgatccttacggtccgggatatggtggtaatttaggaaattacaaaatgatttccagtgatttgtatgaaaaaatttcagataatgacattcgtaaaaaatggtttggagttgatttgggagaagcaaatacccattataaagtaagacaatatgtgcagcgcaaatttattgatgtaggttctaccgcgcctggttttactcctacaggtgatactttttgctctgactatatttatttgcgtactggtgaaatgtattttgtagctgcagaagcattatatagggcagggaaagaaagtgaagccaaaacaatgctgactacgattatgaaaactcgtaatccaaaatatgaaacatccgcaacaagtgatgcacttttacaagaaattgaacttcaaaagcgtattgaaatgtggggtgaaggtcgtcgtttatttgatatgaaacgtcgtaatgaaagtttggataggacacatgcaattaatcatagtgcgattgctccaaaggaagtccctgcaggtagtaaattattcatttatcaaatccccgataaagagttaaatgccaatagtgagattactgataaaaacgaataactaataataagtctataataaaaaagatgcctagtaatctaggcatcttttttatgcttaaggtagaataaaagtagacataaaatcaaattatttttttcttttttataatatatagttgatttatagtttgttataatagatatgatattgtatatctataagaaaacagaatgctaaaactttgattactagatgcttttttgtatattttagttctgcaaagactttggtagtttcctttatcggaatggctacacaagaagtggcagtcaaagcaaacttgaatattgtattaaagtctgatacagaacagcttgaagaggtaatggtggtggcttatggtacggcgaaaaaatctgcatttacaggttcggctgccactataaaaaatgaaaaaatagcgacgagacaaacttcaaatgtgacaaatgctttggcaggtcaagtagccggagtgcaaactacgagtaataatggtcagccgggcaaagatgctgaggtgcgtattcgtggtattggatctatatcggctagtaacaaacctttgtatgtggtagacggagttccgtatgatggtgaaatttctgctatcagcacttctgatatagaatcgatgacagtgttgaaagatgctgcttctaacgctctgtatggtgcacgtggtgccaatggtgtaattttgattactaccaagcgtggtaagagtggggaagctcgtgttacttttgatgctaaatggggtataaataaacgtggagtacctaattatgaaacaattacggatccggctacattctatgaattaaactattcttctatctataatgctgatttgaaaggatatgcggcagccggagacttggctaaagctaatgcgtacgctaatcaagcgatgctttcttctacatatttgggatatcaggtgtattccattcctcaaggacagcaactgatcggtatggatggcaaattgaatcctagtgcgacattaggttattctgatggtacatattattatattccggataattggtcggatgaaatttttgaaaataacctgcgccaagagtataatttaagtattagcggtgcgaccgaaaaaatgaattattatatgtcggccagctatttggatgataagggaattgttcctaactctggttttcaacgttattctgcacgtttgaaagctgactatcaagtgaagccttggttgaaaatgggaggaaatgtatcatttactcattatgatagccgtgaacaggatactgagggtggtacctcaaatgcaaatatcttttatgcgtcaaatattatgggagctatttatcctatgtatgttcgtgatgcacagggcaatattatggtagataatcgaggtttccttcgttatgattatggaaagcaaggacaagattcgaatggtagccgtaatactattcctaatgcaaatccgttggcaagttatatgttggataaaatgaaatattctggtgatgtggttagtggaaaatggtctgctgatattgatatatggaatggaatcaaggcaaaagtgaatataggtgttgatgtaaataatgtgcgttctacaaatatggttaaccccttctacggacagtattccgaaactagcggagtcggaggtttgatcagtgtagctactgagcgtacatttagtgtaaatcagcagtatttgttgacatacaacaaaacatttaatgatgttcataatgtggatattttggccggacatgaaagttatgactataaatatcaatatttgtacggacaacgtgagaaattgtacgatccgaatgttcctgaattaggcaatggtattatgaaccagagcaataattcatattctcgtaattatgcaacagaaggatggttgttccgtgcgcaatatgactatgatggacggtattttgtttcagcttctttccgtcgtgatgcttcttcttgctttcacccggataatcgttggggtaacttctggtctgtaggagcaggatggttattgagcaaagagagattcttggaaaaccagtcttggattgatatgttgaaatttaaaattagctatggtttgcaaggtaatgataacttgatgttccaaggtggtttgtaccgtaactactatccgtatcaagaccagtatacattggcaaacagtaatggtgatttttcaacttctttatattataaaggtaataaggatattacttgggaaacttcacatagctttaatactggatttgattttgctttttggggtggtaagttaggtggttctgttgagtacttctcacgtaaaacaactgatatgctttatttcaaaccggtagcagcttcaatgggttattcccgctatcccgagaatgtgggttcaatggtaaaccgtggggttgaattggatttgtattccaatataattgaaaacaagaacttttcctggaatataaactttaatcttacacattttaaaaataaagtcttggaattatctcctgaactgaatggacaattgattgatggtggtcggatttatcgtgaagacgagtctatgtaccagctttatttacctaaatatgtaggtgtggattctgagacaggagagagtctgtgggcgctggtgactccggatgagaatggtaatacagttacaaaatcttattctgtcgcttctgaaaacagattcgcatcaggtgatattctacctaaagtttatggtggttttggaacaagtgtcacagcctatggctttgatctctctgtttcgtttgcatatcagcttggtggacgtattttggactatacttaccaaggattaatggacgtagcagctacaggtagtgctttgcataaagatatgttaaaagcatggactcctgaaaataaaaatacggatgttcctcgtatgaatattaatgaccaatatacgaacagattaacagatcgtttcttgactagttcggactatttaagtttgcagaatattacattgggttatactctgccaaagagtctgacacgtaaaatgcagattgacggtgttcgtgttttctttgttgcagataatgtggctttgctgacagctcgcaaagggctggatccacgtcaaggttatgtggctgctgacaatgtgtattcacctatccgcacaatttccggaggtatatctttaaatttctaatttagcaacctatttttaagaatatgaaattgtcaaataaatatatagcatttgcaagtgtcgctttattaatggcatcttgcgatttggataaattccctgaaggagattacatatctgaagaacagaaagaagatataatcaatggcagacctaatttgataactgctgaagtgaatgctatggcagccaaattaaatacttttggtacgatttcagatgatgccactacttatcataatgattatggtattcctgcggtatctatgatattggaatcaggagggcaggacttggttgcattggttaatggatataattggtttaatacatctcagaattatagtgacagagtatacgatagttcaagcgatgaattgatttggaaaacgttctataatcacttgaaagctgcaaacaatgtactgaaattgatagcggcagatacggaagattcttctttgaaggtttatcgtgggcaagctttagctgctcgtgcttatgactatctgaacttggttcaaatctatcagtttacttatgcaggtcatgaaaatagtctggcagtacctattgttacagaaacaatgactgatgaagatatgcagaataatccgcgtgcaactgtacagcaggtgtatgaccaaattatgagtgacctgaatacggctgctgatttattggccgggtatgataatggctcaaacaaagatcagattgatgagacggtagtttacggattgcgtgctcgtgctaatctgttaatgcaaaaatgggcggatgcagctaaagatgcagaacgtgccatcgctggcggtacacctcagactttagctcaggtgtctactcctacctttaattcggcatcggcaagttcatggttatggggagtgatgattacgcctgataatgatgttgtccagactggtattatcaactggccttcgcacttgtgttcttttaccggaaacggttatacttcaggagtgcccgatggatatagaaaggtgaactctgcattatatgatttaatacccgaaacagatattcgtaaacaatggtttttgtctccggataataaatcttcattgattgataatgaacagattgagggtacttccatcgttgaatattttggtttgactccgtatgtaaatacaaagttcggagcttatcaaagtatatttggtaacacaaccaatgcatcagactggcctttgatgcgtgttgaagaaatgtatctgataaaagctgaggcagaagccatgggtggtaatttgagtggcggaaagagtacattggaaaattttgtacgaacatatcgggacccttcctttacaagtaaagctaattcggcacaggattttcaggatgaggtttggttgcagcgtcgtatggagctttggggagaaggtttctcactgttcgatatcctgcgcttgaaaaagccggtgattcgtaagaatacgaattatgacccgtctgtacaatataattcagctgcagaagcacaaatcctgatctaccggattccgcaatgtgaaatggaaaccaattccggaatcagtgatactgataacaatccggcggctccacaaccacagctatagggaataactgtaataaaaaagaggatgacgttcaacgttcatcctctttttttgttatatttgtcgcgaacttatttagattgatagataaatgaaagaatttgtaatttctgaagcacaggttgaaactgccattttagttggtttgattactcagacacaagatgagcgtaagaccaaggagtatttggatgagttggagttcttggccgaaacggctggggcaacagtggtgaaaaggtttactcagaaactgcctgctgccaattccgtgacttatgtcggtaaaggaaagctggaagaaatcaaggaatatattcatcaggaagaggaaaatgagcgtgaagtcggaatggtgatttttgatgatgaactttctgctaaacagatacgtaatatagaagctgaactgaaagtgaagatcttggatcgtacttcgctgattctggatatttttgccatgcgggctcaaacagcaaatgctaaaacacaagtggaattggcccaatacaagtatatgttgcctcgtctgcaacgtttatggactcacttggaacgtcagggaggtggatctggtgccggtggaggtaaaggctctgtgggattacgtggtccgggtgaaactcagttggaaatggaccgtcgtattattttgaatcgtatgtcattgttgaaagagcggttggctgaaattgataaacagaagtccactcaacgtaaaaaccgcggacgtatgatacgtgtagctttggtagggtatactaatgtgggaaaatctactttaatgaatttgctttcaaaaagcgaggtctttgctgaaaataaactttttgcaacattggacaccacagtacgcaaagtgattattgagaatctgccatttctgcttacagataccgtaggatttatccgtaaattaccaacggatttggttgattcctttaaatcaactttggacgaagtacgtgaagcggatctgctgattcatgtggtggatatttctcatccggattttgaggaacaaatttctgtggttgataaaacgattgctgatttggaggcaggtggaaagcctaccatgattgtttttaacaaggtagatgcttatacctatgtagagaaagcagaggatgatttgactcctaaaaccagggaaaatattacattggaagaactgatgaagacatggatggcgaaattgaatgataattgtatcttcatttctgctagagagaaaataaatatggatgaattgaagactattatatataataaggtacgcgagctacacgtacagaagtatccttataacgattttctttatcaaacctatgatgaagaataaatacatatagaaaatgaaaacttatcgttcacttacacaagaagaaatacaacaattaaaagagagatcatgcactgcggttgattgggctgaaattgaagtagtagagaactttaagacggactatatttgtcatacccgtttttctggaagggtcagattgggagtttttgaagacgagtttatgttggcgggtggcatgtgtaaacattccggattgtatcatgcgactttgcataatgtaacggtgggcgataattgttgtattgagaatataaaaaactatatagccaactatataattggggattatgcatttatagagaatgtagatattattctggtagatggctggagcaagtttggaaatggcgttgaagtagctgtattgaatgaaacgggtggacgtgaagtgcctattcatgatcgtctgtcagcgcatcaggcctatattttggcattgtatcgtcatcgtcctgaattgatttgtcggatgaaagccattattgaccagtatgctgaagagaatgcttcggatacaggtactattggccagcatgttactattgttgatgcgggatatataaagaatgtacgaataggtgattattgtaagatagaaggggcgggacgattgaaaaacggcagcttgaacagtaatgagcaggcgcctattcatatcggctatggagtggtatgcgatgattttattatatcaagcggttctaatgtggaagatggaactatgttgacccgttgctttatcagccaggcatgtcatttgggacataactattctgcatctgattctttgttttttagtaattgtcaagaagagaacggtgaggcatgtgccatttttgccggaccctttacggtgactcatcataagtctactttgctgattgccggaatgttctcttttatgaatgcgggttccggctctaatcaaagcaaccatatgtataagttaggtccgattcatcagggagctatggagcgtggggcgaagactacttccgattcttatattttatggcccgcacgtgtaggtgcattttctttggttatggggcgtcatgtgaaccatgctgatacttctaatctgcctttttcttatctgatagagcagcaaaataccacttatttggtgccgggggtaaatttgcggagtgtaggtacgattcgagatgctcaaaagtggcctaaacgtgacaaacgtaaagatccgaaccgtttggatcaaattaattataacctgttgagtccttatactattcagaaaatgatgaaagggcgtagtattctgaaggaattacgtaaagtatccggagaaacctcagaaacttactcttaccaaagtgcgaaaattaagaattcttctttaaataatggcattcgtttttatgaaacggctattcataaatttttgggtaattcattaatcaagcgtttggaagaagttcgttttaacagtgatgaggaaatccgtgcccggttgattcctgatacagagatagggacaggagaatgggtggatatttccggattgatcgctcctaaaagtgagatagagaagttgatggcagatatagaatctggaattctgactaatgtggatcagattcatgcccgttttgttgagatgcatcgtaattattatacatacgagtggacatgggcgtacgagaagatgcttgagttttataatctgcgttccgatgaaataacggcaaaggatgttattgctatcgtgaagaagtggcaggaggctgttgtcggattggataaaatggtctatgccgatgcgaaaaaggaattttctttgtctgctatgacggggttcggtgcagatggatcacgtgaagaaatggagcaggattttgaacaagtgcgtggggtatttgaaagtaatccgtttgtgacagcggtgttgcagcatattgaagcgaaaacagcgttaggtaacgagttgatagaacggattgcttctatatgatatttttgatgagagtattcaaactaagatgaacattcggaaaagttacagatggtagttatatataaaagagccgtatgaacgctggagtagttatacggctcttgctattggatgacatttgagcttggacactcccttttttatttttttaccacaggtagtataactctgcttgcagctccttgctgatgataaattttgattttttgtttcatcacaaaatcttctaccgtacaatgataggtatcaataaatttttgtggattgcggtcaataatggggaaccaagagctttgaatttgaatcatcagtctgtgtcccggtaggaatgtgtgtgccacatcatacagtgtgtaattaaccggagttatttcttccggtttgaaaggcaggggattgtcgaatcccttacggaagcgtcctctgaacaattcgccacgaatcatcagctggtacccactcattggatagtcactctttaaataattgcgtgcagttttggaatattcaaatttttcaggatatacatcaattactttcaccataaaatcagcgtcagtactactaatggcagtcattaattccacttctatagggccggccagtgtcaatgtatcacatagcggctccgtcatgaaagtaatgacatcgggacgtgaagtggcaaagcgttggtcatctaccatgaattcttttgtccggtaagtggtagggtttgccgtatagggtaccggacgtgacatatctgaaatatattctgaataagactcttgttctgccggtgcttgtgtggatactgatccgtttttatgtatataataaggtatgccagtagttttttgtacaggccattcgtcgtatgttttccattcgttttcacctgtatggaatatatttactttatgtttgggcttttctccctttccttccaggaaatatcggaaaaaaggatattctatattgtccatgtaataagccgaagtgcttttgccgaaatacagattaccgaaaccttggaacccgcgtactgtccaggctccatgccaccaaggaccgaatgtcagatataaatctgtatccggtgattgctctttgatggctttataaagattccaagctccgtaacagtcttcggagtcatatagtccacctaccaccaatatggcgggcttcaagttataacaggaggtacgtgcgtcgcgctctttccagaaatcatcgaaatcagggtggtttttgatatcattccacaatgtctgtgtagtatcacgtaccaagtcgtccacgttcttaaaggtaccgagtgtcagaaaatctgtgtaaacatcattctttacaatttggttcatcactcctttccctatgtggcgtccttccagtctgggaaggaaattagtggtttgcagcagggtgaaggctccgttgtgatgacggtcatctccacggaaccagtcggtgacgggagcttgcggagaaacagctttcaaagccggatgattggaggaagctgtcatagtggcatagaaaccatcataactgattccccatgttcctacatttccgttattatatgtgttgtgaatcaaccattctatggtatcgtatgtgtccgtagcttcgtctatattctttttatctttcttaccctttttgtttttgttgagagggcgtacttggataaatatcccttcactcttatgccgtccacgtacatcttggaagacgataatatatcggtgctctatatagtttttcagattagtcctgaaatgacggtcaaatccttctccgtatggggaacaagagtaagggctgcggtgcatcaggataggatgctgcctgctgttgtctttcggttcgtagacagcggtgtaaagcttgattccgtcacgcatgggaatcatgacttcccgtttcgtgtagatttccttcagtttgagttcgatactgtccggttggttttttgcttgggtttgtgtccatcctcgagggatgagaaagcataacagtaatgaagtaataaataataatttgcctaattttttcatgtataatgcgatgttattttaatgagttggcaaaggtaaggacattccttgaaagttttcacgctaattaaggaaaaatttcgataatagttactacctttgtcacactaataacttttaactaaaaataagtatcaatatggcaacacctccgttccactatcagcacatgttcccgttgggacctgataaaaccgagtattatttgctgactaaagattatgtgtcagtaagtgagtttgaaggaaaacctatcttgaaaattgaaaaagaaggtctgactgctatggctaacgctgctttccgtgatgtttcttttttgcttcgccgttcacacaatgaacaggttgctaagattctgagtgatcccgaagccagtgataacgataaatatgtagcattgactttcttgcgtaatgcagaagtttcagctaaaggcaaattacctctttgtcaagatacgggtactgctattatccatggtgagaaaggtcagcaggtatggaccggctattgtgatgaagaagccctttccttgggagtttataagacttatacggaagaaaatcttcgttattctcagaatgctcctttgactatgtacgatgaggtgaacaccaaatgcaacctgcctgcacaaattgatttggaagctactgagggtatggaatacaagttcctttgtgtgactaaagggggtggttcggcgaacaaaacctatttatatcaggaaacgaaagctgtattgaatccggctacattggttcctttcctcgttgagaaaatgaagactttgggtacggccgcttgtcccccttatcatattgcatttgtaatcggtggtacatcagcagagaagaacttgctgactgttaagttagcttccactcactattacgacgagctgcctactaccggtaatgaatacgggcgtgctttccgcgatgtggaactggaaaaacaagtattggaagaagcttataagattggtttgggtgcacagttcggcggtaagtatatggctcacgatgtccgcatcatccgcttgccccgtcacggtgcttcttgtcctataggtctgggtgtttcctgttctgctgaccgtaatataaaatgtaagatcaataaagacggtatctggattgaaaagatggatgataaaccgggtgaactgattccggcagcacttcgtgaagcaggtgaaggagatgtggttaagattgacctgaaccaacctatggcggatattctgaaagaattgaccaaatatccggtagctacccgtctgtcattgaacggaactattattgtaggtcgcgatattgctcatgctaaattgaaagaacgtttggatcgtggcgaagatttgccgcagtatatcaaagatcatcctatctattacgccggtccggcaaaaactccggaaggtatggcttgtggttctatggggcccactacggcaggacgtatggatccgtatgtggatttgttccagtcacatggtggtagcatgataatgttggcaaaaggtaatcgtagccagcaggtaacggatgcttgtaagaagtatggcggtttctatctgggctctattggtggtccggctgctatccttgctcagaataatatcaagagcattgagtgtgtggaatatccggaattgggtatggaagctatttggaaaatagaagtggaagattttccggcattcattttagtggacgataaaggtaatgacttcttcaagcagttgaagccgcgttgccttggaaattgtaaataattaattatttcgtaataatactaatacagccttcctccctttaaaggagagggggctgttctgttttttatttaattggtgttatccgttaccttaataatatgatgaaaaaactacgattgttgtttgtgctgttatgggtgacaagcaacttattttcttctcctgttacaggattattagagcgcatcgacaaaggagcttcctccaaatttattatcgaacgtcagaaatcggggaccgatttttttgaactcgatcagaaaggtgataaagtaattatccggggtaatgattatgtaaatattgctaccggattgaattggtatttgaaatattatgcaggcatacatctttcttggaatggaatgactgcaaaactgcctgctgttttgccccctgtgactaaaaaggaacggcatgaaacagatctgccctatcgttatgatctgaattattgtactttctcttactccatggctttttgggactgggagcgttgggaaaaggagatagattggatggcgcttcatggtatcaatctttccctggcattgacagggactgagtcggtttggagaaatgtacttctaaaactaggatatactaaggatgaaattaatgagtttgtagccggaccgggttttacagcttggtggttgatgaataatctggaagggtggggaggacctaatcctgaaagctggtacatccgccaggagaaacttcagaagaagatcgtaaaaagaatgcgtgaatatggcatcgaacctgtgttgccgggatattgcggcatggttccccataatgcaaaggagaaattaggattgaatgttgctgatcccggattttggtgcagctatcatcgtcctgcctttttacagccggaggatgaacgctttgaagaaatctctgctttgtattataaagaactgacaaaactgtatggaaaaactggtttttacgctattgatccgtttcatgaagggggaagtactcaaggagtaaatttggatgcagccggtaaagccatcatgaaagccatgaaaaaaacaaatccggatgctgtgtgggtggctcaggcatggcaagacaaccctcgtacttcgatgatagaacatttggaagcaggagatttattagtcttggatttgcacagcgaatgccgtccgcaatggggggatccggcatcagaatggtgtcgcaaagggggatatggacaacatgggtgggtgtattgtatgcttttgaattttggtggtaatataggattgcatggtaaaatggacgcgctaattaatggtttttatgatgcgaaaacagataaccatgccggaaagacgttgtgtggagtagggatgactccggaaggtattgagaacaacccggttatgtatgagctggtgatggagttgccatggcgtgagcatcggtttactcgtgatgagtggttgaaaggatatgtatatgctcgttatggggtagaggatgaggctttgcaacaagcttgggatttactaggtaacggtatttataatagtcccaaggagaagatacaacagggaacgcatgagtctgtattctgtgctcgtccggggttggatgtatatcaggtatccagttggtcggagatgaaagaatactataatccgcaggatgtgatagaggctgcccgactgatggtttctgtggctgataaatatcagggtaataataattttgagttcgatttggtggatgtgctacggcaggcattggcagaaaaggggcgtttgatgcaaaaagtggtaacggctgcgttccgggcaggagacaagcaagtatttgagttggcttcacagcattttctgcatcttattctattgcaagaccacttgctgggtacccggaaagaattcaaggttggaacttggattgaagcggcacgttcagcaggacagacccaggaagaaaaagcattatacgaatggaatgcacgtgttcagattactacatggggaaatcgtgtagcggcagatcaaggcggacttcgtgattatgctcataaagaatggaatggcattttgaaagatttttattttatgagatggaaggcttattttgattatttagcttgtgtcctggatggaaagcaaccggaggaacttgatttttataccttggaagaagcatggactaaagaaacaggattctattcctcaattcctgaaggaaatactgtggtagtagctaaaaacatttttgaagaagttttttaaatgttctttctactatggataacttaagactttcataggttataaggcttgattatgggttcagaactgatgggtatgaaattatgataactttattcacggtagggggtgattgaatttaccccttacagtgaatgaaagttatggaagcagatagcgtgtagaaaacgcttacttcttcttttcggatgtctgtttccagatacgtaccatatagaatgcacaatgtgtgaacgcaaagacgaacgaaatagcgagcaatgtcttgtcttcctcccagcctacagtctgttgatgccataatcctgtaataactgaaagtacagacagggcgattcctgccatattcaatatggtgagtcctttgcgtcgttttacattatgctctagcttgctgtgttttactccgtagcaggcataaacatccagacctatcagcatccataataccaatcggatccaagtatcagccggaagaaacaacatcatacaaaggcaggtaaggatgcctagaatcggtaccgtgggaacaaaaggagttttaaaggcacgatgtacgtcaggcatacttttgcgcacgatcaatactgccgcgcaaaccaatgtgaaggcgaataaggtacctatactggtcatttctccggctacacgtgccggaacaaatgctgccagccctcctacaatggccatgaataacaaattactgtgtgccggggtccggtatttctcgtgaatctttgaaaagaaaggaggcaacagtccgtcgcggctcatacttagaaatacacggctttgtcctagcaaagttaccataataaccgagcagtaaccaaacaggatagccagtacgatggcccggttcaaccacggataatccggatgaattactcctgtggcatctgcatgtcccatgtggtcaatcgctacggcaacaggtgcgataccttgttgtcctgcaaagtcagaataatgggcaactcccgtcattacgtaagcaaataccatataaagaatggtgcaaatcagcagggaacctagaatgccgacgggcatatcccgcttcggattttttgtttcctgagcggctgtacttacggcgtcaaaaccaagaaaggcgaaaaatacaatcgctgctccacgcaatacgcccgagaatccgaactcgcctaaagtacctgtattggcagggatataaggaacataattctctgcattaatgtatttccatcctaatacaacgaaaataagaatcactgccaccttcaggaatacaatgaagccgttaaaaatagaacttccttctgttccacgaatcagaaaaatactcatcagcactacaatcagtgcggccggtatattcacaatacctccgtcccagggacaagcagcaaatgcatggggtatattgatccccactccttccaaaaaaacaacgagatatctgctccaactgatactgacggtagtagcggcaacagtatattccaatactagatcccagccgataatccatgctataagttcgcccattgtagcatatgagtatgtataagcactacctgctacaggtatcatggaagcaaattcagcatagcataaaccggcaaaacaacaaccgattgccgctatggcaaaagataaagtaatggcaggacctgtgtatcctgcggccactgttccggtgatggaaaataatccggcaccgatgataacacctactcctaatgcgattaagctccatggtcccaagactcttttcagggtcttgtttccagactcataggcttcggcttgtaatgcagcaaaaggtttcttgataaataatcccatatctttttacaacgtacttagtgataattgtgtgcaaaggtacggataactgctatgaattacaagctataagtaaaggctataacgattattcaagatatttcgttattcttccacttagttggagcagggaaatttcacagactttggtgttatattcagcagataaaatacgttcttccgcatcaagcagactcttttgggcttcacgcatctcgataccggagagatctcccagcagataacgttctttggctatttcatggttttcacgggcggcaaccagattttggcgttccaaatttaataaacgtaaattattgcgataggcttgccacagattgcttaaatctgctttcaaacccaattccagttgttctctttccagttgcgagttacgtatttgcaggctggcattgcgcttttcacggcgacggttaccatcccataggttaatgcctacggtaattcctccgtttagtccccaattgcttctccggctggtggcgtttgtttcatatttgttgaatgtatagccataaccggcattcaatttcacatagggataattacgggatagaacctgacggtaatccaattgggcaattgttgtattttgatcagctttcagcaggttggcattcgtcttaagggtggattcccataattcatcataattcagcgcgtcattcactgttatgatagagtcattgacacgtagcggccggttgacttcctgtacagccattaactcgttcaggttgatacgtgaggtaaccaccagttcttgttgtttcatatattgtgcactgtctgcattgaagtccactttggcttgttgataatccagccgggaaaaattaccgatatggtatcgttcttctacaatgcgcaggcgttctttggataaagacacagcgtaaaggaagttcttcagacggatttcctgttgtacataattatagtattcggcagtgagtcccgctatgaaatcttcaagggtgatacgcgtgttggtttctccctggtgttccaattccttaagttttttgtaggtggtgctgatattgaatccgtcgaacagagtccagtttacatccagcccggcctttaaggtttggtcgtagatgtttcgttcactggctgtagtgcctgtacttctgcttttggtatccgtattgtccaacgttcctgtatatccggcagacaaatcaacagttggcagataaccggcatttgctaatgtggcattgttatggctgatttgttcttcattacgggtgatacgtatggaataattgtttgcaagcccttcctccagacattttttcagcgtataaggatattgcgcataggtggaagccacccatgcggtgcagatacataaagttataatgattcgtttcatacaatttctgttttaacgtttcggttggtagatatataactataaatagccggtacgatatacatggtcaggaaagtagatactaacattcctcccacaacagccgtacccatggcgatacgttgattggcgccttctcctgttgcgaatgccagtggaatcaaacctaatacggtagaggcacttgtcatgagaatagggcgcaagcgttgcaaagcggcatcccggatggcctgcatcttgttttctccgccctcctgcttctgattggcgaattccacaatcaaaataccattctttgccactagacctatcaacatgataatgccgatttggctgaatatgttcatcgtgatacctccggcatacatgaaaatcagtgctcctgcaatggctagcggaacggtaagcatgataatgaaaggatccttgaaactttcgaactgtgctgccagaataagatagataagtatcaatgccagaatgaaagcaaacatcaggctggatgaactttcccgatagtctttggagtctcccgacaaggcggtacggaaggtttcgtccaaagtctgggcggcgattttatccatttcttccaaaccttgtccgatggtctttccatctgctagtccggcagatacggtagcggaaataaaacggttgtagtggtataatttaggaggagctacggattctacaaattctaccagattgtccaattgaatcatttcccctttgtcgcttcgtatgtaaatagatttgatattggccggtgtattacgttgttggcggtttatctggcccaaaatctcatattgttttccattcatataaaaatagcccatacgttgtccgctgagaccgtattgcagtgtttcggctatatcacgcacagtggctcccattgtgcctgccttatcacggttaatattcactctcatttctgggctgctgaacttcaggtccacgtccgccatctggaaagtagggttatcatatactttgcttaaaaaatccggtaatactttctccagtttttctatactgacagcttgtagtacatattgtacgggcatacttcctctccgcccgccgaaagaagactgttgttgcacaaaggcacgtgctttcgttttattgcggatggcctgtgaaatacgttcggcaacttccatctgggtataatcacgatctttgatatctttcaatgtgatacgtatatttccactgccactggaaacgcgtgcggttactgattctgcatcgggtataatagaatctaccagattgttgatatcttccgtataatcacggatgtattcatagctggctccttcagctgcacgtgtattgatacttatttgcgaacggtcctccataggagccatttcagcgggtatttggccccaaagtactccgatggctatcaacataatcactgtaacaggtattgcccatatgcgtcttttaagaaaagcattcagtgaacgggcatatatgcggttcataccttcaaagaaaggctctgtcttttggtagaaccatccctgtttttcccgtttaatcaataacttggttgccagcataggggtgaacgttaatgcggcaaaggaagaaatgatgaccgaacctgccacaacgaaactgaactcacggaataaacgtccgctggttccttccataaatacgatgggcaagaacactgccaccagggtgatagtggtggagataacagcgaagaaaatttcttttgccccttctattcctgcttcgaacggacgcatacctcgttctatgcggatatagatattctctgtcataacgatggcgtcatccactaccaaacctacagacaataccaccgccagcatggtcagcacattgatggagaaacctgctatgtacatcacaaagaaagctccgatcaatgaaaccggaataacgatgcagggaatcagtgtcacgcgccaatcgcgcaagaacaggaaaatgatgatgataaccagtacgaacgcttcatacaccgtactttttacttcatcaatagaagcgcggataaacttagtgttatcaaagccatagctgtatttcacatcgtcgggcaaatccttcttcatctgctccatacgttggtatacggcatcggcgatttcgatatggttggcaccgggttgtggaatgacaacgacacctaccatcggcactccgttcattttcatataactcttgatatctgccggacctagttcggcgtaaccgatatcgctgaaacggacaactcttccgcctacttcttttaatatgatgttattgaattctttagcggtgtgcatttgtcccatggtgcgtaaggtcaattctacggtattaccttcaatgctgcccgaggggagttctatattttcattggttatcgcgttctttacatctaccggagtaatgccataccctgccatcttggtggggtcgagccataagcgcatggagtaacgtttttctccccaaatagatacgctgcttacatccgaaatggtttgcagttgttcttttacggtcaagtctgctatttcactcagttccaacagagagcggctgtcactttggatagctaccatcaggataggcgttgcatcggcatcagctttggatacagtaggagggtcacagtcgcgtggcaggtaacgttgtgcgcgggacactttgtcacgtacgtcattggcggcagtttccaaatcgacggataattcaaattccactgtgatacggcattgtccttgttggctgacactggacaaagaacggattcccggaataccgttgatgttttgttccaaaggctcggttatctgattctcgattacatcggcattggcacccgagtaactacaggtaacagagatgatcggattatctaccgaaggatattcgcggactcccaatgtattgtaaccgatcagtccgaaaagtaatatgatgatggtaagcacggtggcaagcacaggcctacggatactaagttcggaaatattcataaaagtatttcctgaattcaaacagacaatgcaacagtgtcgaattcattgttagttaataatttatatttttcctttggggtcatgtaacccaatctttttctcggtcttgagtttaagatgttttgaacgcgcattacctgttcattggttatgtccctaaagtccgtacccttcgggaagtattgcctaatcaaaccattgctgttttcattggctcctctttcccacgagtggtatggttttgcaaagtaaacaaaaatatttagtttacgtgcaatttcttcgtgaaaactaaattcttttccattatctgccgttattgtatgtatttggtctctaaaaggttccaaggcatcgatggcagctttagttagcgggctggcatctttcccgctaagtagtcttatccatactagtccagttaccctgtcgtttatagttaatagtgctcctttgtgattcattccaatgactgtgtcaatttccaaatcaccaaaacgtactttcttgtctactatcgtaggacgcttgtctatgtccacgcggtttttgataaaaccacgtccattagtcaatgcacctctcttcttatgacttcttccccgtcttcttaaatgcttgtataacaacttatctccatgctttttatcttcccaaatatactggtagattgtctcatgagaaactgtttccaagccctttgttcgcataaacccagtcacttgttctggactgaaatctttctttatgagtatatctacttgaattttcaagtcgtccgtaaacttcacgaagtgctttcgtgaacgcattctggacatatacttagcctgagcgagatccggtttgtaaatgccattacgtttatcactattacgacgtaattcacgacttatagtgctacgatgaactcctacaagattggcaatctcggttcttgactttccgctttgcagataagcggaaatgttatacctttgttcttcggttagctgtttcatattgcaactgaatgttggggaactggaagatgcaaagaaacaacttttccacaggggaacaaaagggaaagaaatcttctttctctgttcctctgaaaaattattcttttcgtatcttctcattgtcatcattctcactcctgttgcattatccgcttgaacttaggtttttttagttgttagttaatggcctgaagttccacaggcattcccttacgtaattgcagtgtacccgatgtcaggatggtatcacccacagacaatcctcgtacaatctgtacttcggcttcggtacggagtcctataataacatctacagggtctgcaactccgctacgataaacaaatactttatttttacccatttcggggacaatagcttcggatggaatcgctatcgcgtcttctatttctttttgttttaattgaatatctgcatatctgcctgccagcagttcgccgttgcggttggggtagatggcacggatgttcaatgaatgggtttccatatctatactggattcggttgcataaacctgtgcatgataggtatccagttttccttctactttgaactccagattagtccctttttttatttcccgggcataacgttccggtacagcgaactctactttcaatggggtcactttggtcagtttggctactacagtggtaggggaggcgtatgctcctgtactgacctgtctcaatccgatgataccgtcgaatggtgcgcggagttcggtcatgtcaatattggccttgatattttcgatatcggcgttaagggtggcaagttcggtttttacctgttcgtatgcttctttactgactgcatctcgttttaacagagcgttttgacggaacacacggtcttcggctaaaggtatttgtgcttccagacgttttaattgagcctgtaactgccggtcgtttactttggcaagtaattctcctcgttttaccaatgtgccttctgtgaaaaaaatatcggtgatctttccggaggtttcaaaagacaaactcacttcttcgtcaggaaccaggcgtccggtaaccaatatttcatctgtcagcaagtgtggttttatgacttgtgcattgactttcaatgtacgttgcttgttttctttaggtaacgcgtcggcggctgtcagttcttcattttcgtgaggggtaaattgatagatgcctagtccggccaagccggctccgattaatataatgatgccccatttgattcgtttgttcatgtgcctttctatatgggtttaataaatacgttaatgtaaggttagataaaaaaacgtggcgctcagtttaaacgccacgttcttttttaatattttttttcgtttgccagcttccacatcgcaaggaaagaggctttggttatatcgactatcttcagccaattgattttctgtgtttcatctcccggaaggtgataatcgggatgggcatcagtgtgataccatataataggtattcccagtttggcgaacgtgccgttgtcgctgcctcccaccggattgtcccaagcccggtagtcaggggatagctgcaagcggtaatcttcaatatcttttttcagccagtcaccgaaggcctgatgggctgcggtatagaagtaaacgaaataatcgggctggtcctcccggttgttacgtcctatcatgtcatagttcaaatagccttttaccttcttaatatccggatagttcatggcgaaataacgggatcccagcaatcccttttcctcaccatcccaaaaggcgaagataacggtacgttccggttgctcaccggtagcaagaaaggcacgggctacctgtaatacggcttgaacgcctgatgcattatcatctgcaccgttataaatctgatctccttccagcataggatcgtagcctatgtggtcgtaatgtgcgccgataatgacaatttcatttggattctttccttctattttacctaagatattacgtaatgccaatttttgatgtaccacttttttcagttccgcaatagaatcgggatgtacttgccagcgttttcctttcacttgccgttcagcatgatatacatcaaagggttgtatataatctccggctagcagtggttttattcccatctgtttcaggcaggaaatgatataattgcctgcaatgcgtccacctttccatccggcttcgcgtccttccagttcgtcacaggccagaaagccgatatgtgcttcggctgtggcacggttaatggtttctactccttttttttcaggagtcacttttttaggagaagcggcattcagcccggtggtgcataatgcaaacagtgcaatagctaagaggtgttttttcataaagttgtggtttttagtaagcggcgcgatacttgccttcttccttgtcttccaacatgttcaggtaagaagtatagcgtgactcgctgattagatgtttctccactgcatcgcgtacggcgcatccgggctcgtgcctgtgggtgcagtttccatacttgcattgagcggaatattcaaatatttctttaaagtaatgtcctacttcctcttcttccatatcaaatgttccgaaacctttgatacccggagtgtcgatgatgtatccaccaccgtctactgggaacatttcggaaaaggttgtggtatgcattcctttgttatggtaatcggaaatttcacctgttttcaaggtttgttcaggcaaaatagcattgattaatgttgatttccctactcctgagttgcctgaaagcaaagtgacctttcctttcaggtcttttttcacttcgtctgtacctatgttgttcagtgcggaaactttgaagcaagggtaaccgatgtatgtgtacaggtttatcagagcatccatatagcgtgtatcatcctcattatacctgtctatcttattgaatatcagtttgacgggtacacggtatgcttctgcagtggctagaaaacggtcaatgaatatagttgaggtttcgggataattaattgtaacaatcagcatacattgatccagattggccgccagtatgtgcgattgtttggaaaggttagaggcgcgccggatgatatagttcttgcggtcttctatcttactgatgaaggcggttccttcattgttgataatgatttgtacataatctcctacagcaatgggattggtactccgaataccttttaaacggaaatttcctttgatcttgcattcgatggtacgtccgtcttctgttttgacaagataccagctgcctgtgttttttattactagtcctttcataaattaaaatgaaggatgaaaaatgaagaaagagggattggaccgcacggacaagagcaaggctgtgcaggacaattcttccttcttcattattattgcttcattattttaagttcttcattaaaccgtcataatttctttatctttctctgccagaagttcttcaatcttcgcgatatatttatcgtgtactttctgaagtttggcttccgcattcttttgctcgtcttcgggcataccctctttaacagcttttttcagtgtatctatagcgtcacggcgtgcgttgcgtatacttacttttgcggtttcgccttcgcctttacattgtttggccagttgcttgcggcgttcctctgtcaatggcggaatacccaaacggatgatttcaccgttgttttcgggagtgatgcccagatcagagtccatgatagctttttcgatgatacggaacatacttttgtcccatggcttgatggcgatactgcgtgcatcgggagtagtcacggcagctacattactgatgggaaccatgcttccataagagtcaacacgaatgccgtccagcaaccgggtactggcttttcctgcacgaatgtgcgctaaggcctcttccaaatacataacggccatgtccattttctcttgtgcgtcgttgatgcaagtttttgcgtctatcatactgttctgttatttaagttgtttattgattcgttttaagtgaaacaaaagtaatttattttttgattatctgcaataaaagggggatgattttatatttctaacggctctttactttatcatcaccagtttaagttgttgaagctttattaaaaataggtgaaaagtttttgtgtcttatcggataacaggattgaaatgatgaacaccttaagcctttcttccctgtgtactaagtcttttttattgcatgattaagctttttcatacggcaacctattacagactccgataatggactgtataaactattgtagtggactgtaggggctgctgtaatagactgtacggtccactgacggagtctgtagtaggttgccgtatgaaaggccttagctgtgcggaagaaagcccttagtctacggggagaatacttttgtaatcaggtataacgacgagacagacaaagacatcaacagaattagggtaaatttggttggtaagcattatctttgcattaaaaaagatgataactttatatttagcccgtcacgggcagacagaagagaatatgacccgtattttccaaggacatatgccgggcacgctgactgttgaaggaatagcacaggctgaagcgctgcgtgatactttgcgggacatctctttggacgcagtggtcagtagtgatttgaagcggtgtgtggatacggcccgtatcgcggtggaaggtcggaacctgccttgggagaaaatggttttgttgcgtgaaatcgattgggggagctggacggggcttgccattaaagaagttgatttgcgacattttccggcagatgtggaaacggaggcgatgctgtatgagcgtgcggggcgttttgtggactacttgaaagagcgatatgatggaaaacaggtgttggctgtcggacatggactgataaacagggcggtacaggcacacattcaaggagtaactttggaacatttgcgtagtgtgccaaagatgaataatgcggaactacgtcggttcaagttaacgtaattccgcattgaataacacgtggttattgcaaagtgattcccattattcctatcactacatcattggacagggtttccagggtcagcccttttagttccttggaatgatccaaaggaatatcgagcaatatgcctgcaccaccttctatctcacgtccatatacaccagtgatgttgagttctttacccaggtcacggcttactttaccgcttttcaagtgcagacggtacggccggggagcaggtacttggaacgctttgccgtccacatagaggtcttgttctatgggacaccagttgtccggattgatcaactccgttgcttgggaagttccgtctgcatagtgtatgcggattattccattggcaatgtggcattgcatgtggttggtacttcccgccatcagcagataagcatgtgaggctgtaccggatagtgagatggtggaactgtccgggtaattatcccatagggaggtgaaaagaatgttgttccctttttctttcagacggaaagggatgcctaaagacgtttggaaagtatcatgatgtacaaggctgcgtaatcccgagtcgtctatggtagcgctcagcagcggatgacaccattctcctattccctgtgtgggaagttgcaaagtagtgtatggagaccggggagacaggtattcattttgataaatatcggtgacagaagcattcagttgtctgtcaaaatcaatcatccggcatttttcgggacggatatctgcaaagtctgtataggaaggggctttccgggtgttctctatatagatattaacaggttgccaccaatccatttctccttgatgagtgtaaacaaagaaagtgtggtgtcccggttcaccttttagctgtgcgttgaaagcggtggcttccactgtgtgttttgctaaaacgctctgaggatcatatacttgggagatggatgctcccgaaggtatttgcaaagccaacttcccgtttgaagcgataactagttcttggactgccaacgtatgaagtgatgctccttcccattcgatggtaatggtggttgaagatgttccttccgcctggattgaaagaagaggatagccatgggccgattcgatggattgccatgtggcaggaacaccattcacttttactgaacggatcttctcttttctggcattgatttgcaataccggatggagaggagtctggaaccgttgtgtgatatgataggtgtccgtatcttcttttcgggtaaagcgatagcttatatcgggagtactgacggaagccttgtcccagtcgtccggaaagcccggccggaggatgatttgctggttcagggcatccggcaggataccgaacagtccttggatcagtactcgtgaagcgaccccgatgggatcgccgaaatcccggtagcattctccgcgtgcggcatcatagaagctgatctggccgaagttgcccggactgtctcctagatacatgccgtctagaacagagcttttcaaaagtttgtatccggcctcggcacgtccggcctggaagtatgacaatgcggtatgcatgacttcggcaaaggcgatattattgacactccatgaatagggtagccagttggtggtggcgatagtggcatatccattctcttttaatccatgggctgtgacgggaatatgaggaatggctgtgtctatataacgggtagcctgataggcttggaacgggttagctgtctcgctgtctatagcatgataaatggtccatacagcggcactttcgtgtactcgcttgtgtcccataaaatcttgatattccgcccaatgtcctttaccgggaagccatagcctctcgttcatggctttcagaatcttttcggcttcgttgcggtaaggagtgggatcttcgcctatcttttcagccaattgggccgctgtcttgttggcacggtagttataagccgatgaatgggtgactcctccgctattgtaataaagggcgtcactggcccaaatgcaggcgtatgcgtcatacagcccgtcgttatctgggtcgtagttcagcttttcccatgcgaggtgacgggtgatgacaggccacatttggcggacataatccaagtcccccgtccatttgaaatgccataacaattcgtctatgcagcaaaggttcatgtcgtagtggtgcatctgattattgcgatgcggattacggcagatgtatccgttactgtattggggggtaccccatttcttgacggaacgtgccagatgcagggcggaatcttgtgccggatgggggagggtgttgggcacttcggtgacctgacttgccgcgtatgcgttgaaatgggtccgggcacggtcatgccatcccaaaacatcgccggtataagcggctcgccaaccactgagtggcatccgccatcctatggcaccgtgtaaccatacttcgccgtcccagattccatcagctgccatggccagagtgcctcctaaggtgttgaaataagggtcgggtgtttcaatgcggatgcgtgaggctgtttcggagcgggcagcttctgcttttttaaacagggtttcgccttcggcagttgtcagtgtacgtagttcctggttttccaatagaatataaagtgttccatctatctgtgccgggcaggattgtaactgttgaggctggagaggagcttcgaaactgtcggcagggtcggctcccatatctccgttacggtttagcttggaattacgtatctctgaaatggatgccagtagaatgggattggatcccttgaaattccgggcgttgaattgccagatggccccttctttatcgggaagtgccaatgtggcaatagataagtttccaccttcgaaggatgggtggaataaattgtagctgcggcgtcccgctgtataacgggactcgcagtgttcggtagaatcaagggctaccgttcctccggaggtctgcagtttaaagcagatgtgtttcgggttcttcttggtataagcagcgaatacgggccggtcgcttgtctccagccggaatgctgtgtggctgccgtataaggcacgggtaaagcgattcttaccgttgatgcagacaaaatcgtctccgtcaggggtatattgcaggcttcgggtggcattccggcgatgctcgttgtacgaagtggattctatgaaatcgcctatcttttgtggctgcttggtttgtcctgcgccggaaacgctaccgatgcccaacaggcatagaagtaaatatgtcgttttcatgatgataactactaactcctgttcttacggtaatggctgtaatccttcccagcgtacattccatttgccatctttcggaaatccgggattgttcccttccgatccatcccatccggcgcacatcatagcgactgtggtcagtaatccaccgttgccgggcaggtaaatacgcagacgcccgtcctggtaattgtgaccgtttaccagataggtgttggtacgtttgtccatcaataatgcgctgactgccttctcgggctcacccattcgggcggcattcatggctgtcatcggataatcccagccccaggtcttgtcccagttccagttatcccaaatccagtgcagggtgtttttcatatatccggcatgaatcagctgattcatgggcaggatgccgacagcgcccagcactgccatgtgatctgaggtaaaacggatatctttataggtatccaccgcggtctcggctgccagatacagctgttcgtcgttgtatgccagcggagataatttctctatcagtacatcccattcgggtacacgttccatccctgtacgttcacgccatgtttgggcaacttgcatggcgaaatgccagtacgaaagctcaaaaggcggattgacagtttcggcagcgcgcaacgtttcctgtgcggggatagcacctttcaagacataacggtcgtgctcttcctcgtatgtggcgaatgaatacatgaattcggcggtttcctgtatcaggctattgtatttttttagcagttcttccgatggattagcccgatagagcaattctgccaggtagatgagatgaggctgttgccagatcaggaagctgcctactttagagggggcttcaagaccgctgggatcagtcattttcatccatcgtatgcctttgaaaccttgtctttccgctatctggcgggctatgggttccacggtttcataccaggataaagtgcggtccaacaattcgggatgtccccataaggcgaattgtgcctgatgccaccagatcatttccaaatggaatttcccgaaccaggagttgtaagttagtccggtttcctgtggcggggttgagcctgcgcattggatagcgagcagatattggcttaatacgacccggcgttccaattctttggcccggacatcagtacattgtgagaagtcggcaacagctccctgtgtccagtaatttttccagtgtccggaagaggcttgttgtacttctgtaaaagtcaggatgggagaagcggatacttgtggtgtgaattggcaggtgaatgtaaatatactgtccgttggcgtgagtacgaaatagtttgcacttttctcacttagcttcgcagggccttcccaactgattgttacataataggtggttgcgtcgagtgttctttttaacacggccgattgtgcgtcttcactgaccagggtcgtgctatgcttatcattcgcctcccaattacaagcatcgtcacagtgaccgcccgtgggataggggaagtgaaacttgatgccggcaggttgtcgggccgataggcgtgcggcaatcatatcacgctccggatggcagactgtctgaatgtagtagggagtttctttgagagtgaaccggctgttgataataccgttccacatatccagtgattgctgtatgttttgcacatccgagggacgtacttcatttcctaattcgagtccgatgatacccagatgcaggcggtgtgggtttacacgataccagtcggatgcttcctttgctctgccgggttctttgggttgggtggcatatagctctttgtgcccgtggccgaagtcatactccaccaaggcttcctccggtttatagttttcgggatttccgaagctgtgccatccccattggctttgtgtacccagtggaactccgtttttatagacttcgggaaaagtctgcaatcctgtagcatctaccgtataggcaaattctccgttccctaccgacagggaggataatgaatccatggcagtcacttccggattattgcgtgttaccagtgcatggcggtctatggctttctctttgggagaggtgcaagcagccaatgcaaacattgtcagagcataaatggtgtgtttcattgtatatagctaatttaaaaagatggataattctgttgtttatgcgatatgattctatttgccaagctgtaggcaacccatgatgaaaggaccggtagctttggcatcgttgtcacgcattttttcgccaatgtaatattcaaagcttccgtcgcggtaaggagtgccgcctagtccgcctacttggcagcaacgggtcagcgtcagagttccgtcggggttctcgagaagcaatgtttgctttaatccgttgaaggccttttccgcgatggtccggtattgggcatctatatatcctttgttcaccgctttggcataagcatacatacattgggtggttacggatgcttcgggaaaattaccttcacgctcgggctggtctattacctgataccatagaccgtctctttgatagttgggcaggctttctgccaaaccttgaatccaactgataagcgaggcacgtccggggtggttgtcgggaatatagtccagtacatctaccatggccatgaaccaccagcctatactgcgtccccaaaaattaggtgaagtaccgtcttgcggatttgcccaacgttgggatttgctctcgtcccaggcatgatgatataatccggtttccggtgaataggtatgtttgtggcaaagtgtgaattgttttaccgcctcatcaatcagatcaggacggttgaattccgctccatagcgggctaggaaaggggaagccatataaagtccgtccagccacatctgatgttgatagatcaatttatgccagaagccaccttccagcgtacgtggttgtcttttgagttgttctaccagtaagtccatagctgctttgtatttttctttgcctgtttctttatagaggtcaaacagaacttttcctgaattgatgtaatctaggttgtaagttgacatatcatagaggtggatttctcctttttcgttaatcaaactatccgcccattcctcaacataagtaaagtaacgtttgtcaccggtatttttccacatatccagcatggcgcaacagcctactccttgtgaatacccgaaaaagagccgtttgccatgatctagctgataggctttgggaaagcggagcatctcagagtcggcaaagcgctgggcatatgaatcggaagatataccgggaaggggtgtggggactgtagggagaggggctatgcatacttctccactgtacggaattgcttttttagcttggagagacatgggtgccatgcaggcggccaataaatagatgtaacagtaatttttcatggtatttcctgtcgtttttatagtctttgaatgatttacattttttgctgatgtaaaaataggctaattaacgctataagtccatgaataattgttcatttagatggaaaatctatcggttgagtctcttttttaaggaatatgtgtcaataaagaacgaatttgtggaaaaaatggtaagacagagaaaaactgttcacccatttgtcatttagaaggaaataaggaatgacaaatggatgaacttgatgagaatatcagttgtgtaccagtgttcctatattttcaccggtcattacttttttcaggttacctactgtgtccatgtcgaaaacgataatgggtaggttgttttccttgcacatgcaggttgctgtaagatccattactttcaaaccgcgctttaatacctcatcgtaggtgatatcgtcaaatttcgtagcagtggggtccttttcaggatcagctgtataaatgccgtccacgcgtgttcctttcagcatcacatcggcttctatctcgataccacgtagggaagacccggtatcggtagtaaaaaacggattgcctgttccggcagacataattacaacttctccgttttccatcgcttcaatcgctttccatttgttgtaaaactcaccgatgggttccatgcggatagctgtcaatacacgtgccttgactccggctgctcccaatgcggaactcaatcccaagctgttgataacggttgccaacattcccatttggtcaccttttacacggtcaaaacctttagaagctccactcagcccacggaagatatttccaccaccgattacaatacctatttgtacgccaaggtcgtgtatctccttgatttgttgcgcatattcacccagacgcttttcgtctataccatattgcttttcgcccatcaggctttcgccgctcagctttagtagaattcttttaaatcttgccatattggtttgttttttagttttttgcaaagataaaaatattaatcttttttacttgttttatatcctaaaatatttcttcccataactccttgcattactccgcgaagtagaagataggtaatgaatgccatccataaagcgtgattgcccattgctccccggaaaccgtagtaaataagaaagaaactgacagaagctgctatcatggctttcagcatcagatgggtggctgtcgcaccgatgaatattccatcgaacaaaaaagcagagaagcctgccaaaggaatggcaagtacccaataaaaataactttcggaagcatgaatgacagttgtttcgttagtcagtaatccgagaaaggattgtcctcctatactatataataaggtgaaagtaagtgataatcctagtccccagccgaatagttggcgaaccgtcgtgtggagtgctttctgattattggctccgatatatcttcctgccaatgcttctccggcgtatgcgaagccgtccataatgtaggagaataaagtgaataattgcataagtaatgtattgaccgccaacaccacttctccttgtgccgcacctgccgaggtgaaaaagacagtaaccgccaccaggcagatggtacggaaaaagatatccctgtttacttggaagaaacggtacatggcctgtttgtcaaagaaggaatgccattctatgcgtttccgcagggtgctgtagtagcgtaaccacaacaaatatgccatgactagcccggcatattgtgcagttaacgttccgatagcgacaccttctattttcattcctaatccatatactagaagaagactgaccgcaatgttcactatattttgtgtgatggctatatacatggggaaacgggaattttgcataccgatataccagccggcaaaactgtaaagccctaatacagccggtgctccccaaatacagatacggaaatagagaccggccagatgttctacttcttcagtcgtttggataaaggtgaatgcaattctttctataggatattgcaaggctagcaaagtaaatgcaatgaataatcctactccgacggaacggagtagtaaccgggtgacttcattcaggtcgtgcctgccgtatgcttgtgaagtcatgccgctggttcccatacgcagaaaaccgaaaatccagtagatgatgttgaaaagcattccgcctacagctattgctccgatgtaggcggcagagcccaaatgacctacaatagtaacatcaatcaaacccaacagaggaactgtaatgtttgaaacgatagaagggatggcaatttgaagtatttttttgtttccgttattaagttgaatcatgagtgtagattgatagagatggatacaaaggtactctctttctcataaataaccaatgaaaatttaaatttgaactgaaatttgttgttgtttaagatgatatatcattggattatagatatatttgcggttattaaaatggtcaaaacaggagaattatgaaagagaattttcaaatccatatttggttgggcttattgttatgtctgttaggtatgtcatgttcggatgatactccggctaaaggaaatgaaccgggaaatggcaacacggagttggaagtcaatgagtggatagagagtgtcatgcgcagtgattatttgtggaataacgacattcctgctcaagataaattggatttctctgctgatccccaaacattttttagctctatgctcagtttgaaagatggaaagacgagaaacggaaagcatctttattattattcttatatggagaagaataaagattataaagcacgtaccagcattgatgcggatgatacttatggtatggagtttactttatttaatgttgtaaacgatagtaatcaacctttaggatattattatgcccgtatcctgtatgttcttcctaatagtccggcatcaagtgcaggtttggaaagaggggattggatcgtgggtattaaagggaaaaataatattaattccgataattatggaatcttattaaatggggataggactcaatggctcgtcaaacgtggcgatacagaggtcagaactattgatatagaagcttcccgggccgtggaggacaatcccttattctatcacaatgtatatactcggggagataaaaagatagggtatttggtttataatcattttactcccggaccgaatgggtattcggatcgtacctatgatgaggaaatgaagaagatatttgccggatttcaggcacaaggtgtgaacgaatttgtgttggacttgcgatataatggaggtggatatgagaattctgctaatatgcttgcaggactcctcataccagaagcttctcgaaaaaaagtatttgctgttttctctgacaataaaggacaatcctattctaatgatttttgtgtggagacgaaaggaacggcaggttacttgaaacttaattccaatcgaatttatatattgacaagccaaagtacggcttcttcttcggaagtcgttattaacagcctcaacccatttatggatgttatccttattggcgaattgacagaaggaaaaaatgtaggaatggagatgcagaaaaatgataaatatgaatggatgtattggcctattacattgagagtgactaatgcggtgaattatgactacagtgccggttttaaaccggatatagaatggaacgagtatgatttgactcaaaatccgacggacgctttattaccattgggtgatccggatgaattcatgctgggtaaagccatctccttgattacaggagtaaaacgatcagccagaggcatgaatacgttatctaaatcgattatgaggggggaatctgtgtatcaatcgacagaacgtcatgccactggaggaatgttgatggttcctgaagggaaggacaactaaaggatatatttaacttctttgaaggcatattttctaagagaaccgtttttatctttcagaatcaaatgtccgtcgggttccacacggatcagtttggcagtaaactctccttttgcatcgcaataggggtgataaccttccttgcgatattgtgctttcaggtagtattcctgaattttggtgatgatatcagtttctctgttttctatccgggaatagaggtttatgatatgttccaatacgctgtttaaaacttccattctgtctgtttccttttgagtaatttgtcttaatgaaacagggttgggggcggatgaatgaaattcttcctggttaatattgattcctattccaacaatgctttgtgaaatttggcttcctgttaaatcattttcaatcaatatgccgactatttttttgtctttccaatagatatcattgggccattttatttgcaggcaatctgcatggacgtaatgggccaatgcggtacgaatggcagaagctaccgccatagataaaatgaactgactggcgggggcgattgtttggggataaaatacagtgctgaatgtcagattcttgccatattctgattcccatgaattcccacgctgcccttttccggcggtttgatattctgccataagcgtggtgaattccttgatttctttttcctgacaaagttctgcaagtcggtcgtttgtagaggttacagtttcttcttttaagattttgcttaaccagttaggggattttatcatattcttttttaagtttacgggtgaattttttgataacctcttcgtatgagtggtctatcagtaataaaatcagtttgtcgtcaatgtcaccttgtaatgatacttggttccaatatttcttattgaagtgataggctccttcaatgccggaatgatgttctcttaattccaaggcatattcgggtttacattttaaagatagccattccgggttgtccaatccgatgcaggcatacattttccccatgactttgaatactaaggtgacattatcaaaaggaaattcttctgttgttcctttctttctgatacagtaatcgcgtattgtttctatgtccatatataatgtatatatttctaccaaatcggaggataaaaggcttcttcaatatgctctatagtgaaaggagccttttcgcccactaaggtgatgatatcaaaacgtacaggtaaatctactgagaacttgcgcaagtatgcatcagttgaagctatgattctgcgaattttcttatctgttactgcatcttccggattaccgaatctagtattcttgcgggtctttacctctataacaattagttcgtttcgatattcggcgacaatatccagttcttttttcccgcaatgccaattccggtggcggatggaatatcctttatctatgagatatgcagcggcctcttcttctccctccttgccaaattcgttgtgttctgccattctgtttctttttgcacaaaaatactcttttttatgctttgtatttacagaagtaaagctaattttgcagagaatatggcaaacaacgtaaaaaagagggtaaaagtaccggcatcaacccctaaacgcaagcagcgtatggtatgtctgatgagtgaagaggaggtacggattgtggattgttatcttaaaaaatataagataaccaataaggcgcgttggttacgcgaaacagtattgacttttatccatcagaagatggaagaggattatcctacgttgtttaatgaacatgatatgagaagataagatggcagatgatacctattatatgaaacaagccttgatggaggctgtaaaagcagctgaacagggagaagttccggtgggggcggtggtagtctgtcgtgaccgcatcattggccgtggccataatctgacagaaacattgaatgatgttacagctcatgccgaaatgcaggctgttactgctgcggctaatacattggggggaaaatacctgaatgaatgtactttgtatgtcacagtggaaccgtgtgtgatgtgtgccggtgctatagcttgggcacagacaggaaaacttgtctttggtgctgaagatccaaagaggggatatcaaaaatatgctcccgatgccttgcacccaaagacgatcgtggtgaaaggaatacttgccgatgaatgtgcccgattgatgaaagatttctttaagaaaaaacgatgattcttatttcacctcttcataatctacatactctccctcatcctcatcaaagattttttttctgtttcccgacgaatgagaacgtctatttgaagaagaggattctgcaaaattctcattctcgtcattcgcttgattctgagtatatgtattttgtttctggtgggtggaagttcgattttgataggggggacgtttgccgatcccgaacaatacacgcaaaatgttacctaatatagtgaagccgataaaaacaatcagcagaaaaataataagtagaaagcctaaaaatccaaacatagtaatttctttttttatatatcacgtacaacaagcgtgccacgtttattgtttacgctctttttttagttaaaagagatagaatgatataccacaggatgatagctgcaaaactgctgattttaaaaaaaatcaacagggggatgcatacaatgaggaaaatatagctgactttgttctgtttccaggcaagactcttgaattttaatgagaacattgggatttctgccaccagcaataatgacataataactaccaaaatgaaaagatatgccgcattaaaagaatcggatataaggaaagaatgtgctcctacagtcaatgatccccaaaataaagcattagccggagtgggcataccaataaaactactgctctgacgtgggtctatattgaacttgcctaaacgcaaagctgaaaatacggaaataaggaatgcggtataaggcatataatcggcaacaggcaatagaaaatcaggatagtgtacctctttaaataaggaaaagacaatggcggaaggagcgaatccaaaagtgatgtcatcggccaacgagtctaattcttttcctaaaggacctgatactttgaacaaacgtgccaacatgccatcaaagaaatcaaatacagcacctagtataataaaagagatggccaaggtatagtcttcattaaatgccatgacactggcaatacaaccggagaatagattacagcaagttactgcgttaggaatgtggcgtgtgatacagtttgccattggtgattttttttattttagtttagcaatgacggtttcgttacctacagtcgcttgtcccatcttgacacagacttcggttcctaggggaagataaacatctacacgcgaaccgaatttaataaaacccatgtgttcatcaatgtagcaatcttctcctacttcggcataggtcacgattcgacgggctattgctcctgctatttggcgcgccatgacggtatgtccttcgggagtttcaataacgaccatagaacgttcattttccgtactggccttaggcagccatgctttcataaatttaccgttatgatggtctacatgtttcactactccgtctacgggataccaattggcatgtacattgacaatgctcataaaaatagaaatcattaaccggcggtcatgaaaatattcatgttcgtctacttcttctataactactatccttccgtctgccggggctactacgattttttcggtgtcgtgctcgaataatcgaatgggacaacggaaaaagttaaccattaacaggtaaacaacgatacttgcggcggcaaatatatagaatggaattttgcactcaattccccaaaacaacagggcattgataccaattaataggatggcactgacaattaagatgcttgttccttctctatgtagtcttattttctttaatttcttcagtcggttcatgattgtataaaaccaattatcgtgcaaaaataaacttattttgaaaaccctgcaaataaaagttgttagaaatgcctatttcgacttcatttaagataaaaaaagcgaatgttgataacttcttctttatctttttgcaggttttatgaaagcggagtatctttagacaattttttaggagagtaacgattatgcaggattttgtccatttacatgtccatacccagtattccatccttgatggccaggcgtctattccacgtttggtagacaaggctatggctgatggaatgaaaggtatagccgtaacagaccatggtgatatgttcggtatcaaggaattcttcaattatgtgaataagaagaatagcagtactaacggtgagataaaggatttgaagaaaagaatagccggattggaaaaaggtacggtggaatgtgataatcccgaggcggaacttgtggcgtgcaaggagaagttggaggcggcaaagaggaaattgtttaaaccgattttcggttgtgagatgtatgtggcacgccgtcgtttatttaacaaagaaggaaaacccgatcaaagtggttatcacttggtagtgcttgctaaaaatgaaaaaggataccacaacctcataaaattagtgtcaaaggcatggacggaagggttctatatgcgtccgcgtactgatcgtgtggaattggaaaaataccatgaagggctgattgtttgtacagcgtgtattgccggagaagtgcctagaaatataatagctggaaaatatgaagaggcagaggaggctatccaatggtataaacgtgtattcggagatgatttctatttggaattgcaacgtcataaagcgacggttcctcgtgcgaatcatgaagcttataaattgcagcaaattgctaacgaaaagttgatagagtattctagaaaattcaatgtcaagctggtttgtactaatgacgttcactttgtagatgaagagaatgctgaagcacacgacaggctgatctgtctgagtacgggtaaggatttggatgatcctaaccgtatgctctattcaaagcaagagtggatgaagacacgtgccgagatgaatgaagttttcgctgatgtccccgaggctctttcaaatacggtggatatttgtgatcaggtggaattttatagtatagatcatgcaccgattatgcctacttttgctattcctgaagattttgggacagaagaggggtatcggaagaaatatacagaaaaggacttgtttgatgagttcactcaagatgaaaacggtaacgtggtaatgagtgaggaggccgccaaagccaaaatagagaaactgggtggttatgacaaactctatcgtattaaactggaagctgattatctgaagaaattagcgttggaaggtgcgcacaagcgttatggagaagtcttgaatgaggaagtgcaggaacggatcaaattcgaacttcatattatgaagacgatgggttttccgggttacttcttgattgtgcaggattttattcgtgccgcgcgtgaagaattggacgtgtctgtagggccgggacgtggatcggcggcaggttctgccgtagcatattgtttgggtatcactaaaatagaccctattgcatacgatttgctgttcgaacgtttcctgaatcccgaccgtatttctttgcctgatattgatgtggattttgatgatgatggtcgtggacgagtactgaattgggtaactgaaaaatatggtcaggaaaaggtggcgcatatcattacatatggtacgatggcaaccaagctagcgatcaaggatgtagcccgtgtacagaaattacctttatcggagtctgaccgtttgtgtaagctggttccggataagattcctgataaaaaaatgaatttgactaatgccatagcttatgttcctgaactacaggcagcggaagtctcacctgatcctattttgcgtgatacgataaagtatgcaaagatgttggaggggaatgtccgtaatacaggtgtgcatgcgtgcggtactattatatgtcgagatgatataacggactgggtgcctgtaagtacggcagatgataaggaaaccggtgaaaaaatgctggtgactcagtatgaaggttcagttattgaagatactggattgatcaagatggactttttgggtctgaagactctttctattatcaaagaggcgattgaaaatattaagcatagtaaggggattatcttggacattgacgaggttgacatttcggatcctcctacttatgctctttatagtgaaggacggacgattggtacattccagttcgaatctgccggtatgcagaaatatttgcgggaattggaacctagtacttttgaggatttgattgcgatgaatgctctttatcgtccggggcctatggattatattccggactttatcgaccgtaagcatggccgtaagcctattgagtatgatattcctattatggagaaatatttgaaagatacatatggtattacggtatatcaggagcaggtcatgcttttatcacgtttgttggcggatttcactcgtggcgaatccgatgccttgcgtaaagcaatgggtaaaaaactaagagataaactagaccatatgaagcctaagtttattgaaggcggacgaaagaacggtcatgatcccaaagtacttgagaagatttggacggactgggaaaagtttgcttcttatgcattcaataaatctcatgctacttgttattcatgggtggcttatcagactgcttttctgaaagcaaactatcccgcggaatatatggcagctacgatgagccggaatatttcgaatatcacggaaattactaaattgatggatgagagtaaggcgactggcatcatgaccaagggacccgatgtgaatgaaagttatctgaagttttctgtgaaccgtaaaggggatatccgttttgggctgggagccattaagggagtgggggaaagtgctgtgcagtctatccttgaagaacgtgagagaaatggagaatataaagatattttcgattttgtacagcgtgtaaatctttcggcttgtaatcgtaagaatatagaaaacttggctttggcaggtgcttttgatagtttcacgggaataaagcgtgaagacttctttgtaaagaacgctaaggatgaaacctttaccgaagttttggtacgttatggaaataagtatcagatggataaagccgcagctgcaaattctttgtttggaggtgagaatcaagtggatattgctactcccgaaatcattccgtctcctgcatggggggatttggaacgtttgaataaagaacgtgatttggtaggtatctatctttctgcccatccgttggatgagtatgctgttatattagagaatgtatgtaatgtccacatggcggaacttgccgatttaacccctttgcagaacagagacttaaccatgggggggattgtgagtgcagtgcgtgagggatataccaagacgggaaaaccatacggtattgctaaagtggaagattattcgggctcagcggaatttgctttcttcggtaatgaatgggtagagaagaagaacttttttatgactggtatgtttttatttatgcgagggaaatgtcagccaaaacaatggcggcaggaagaatgggaggtgaagataagtactattgaattattaccagaagtaaaggaaaagattattgagaaacttacagtttcagctcctttgtctgcattggatgaagagctgataacggagttttcagccttaatcaaggcaaatcccggtaatgcagagctttattttcatgtaatggatgaggatggacaaatgtatgtcaatctgatgtcacgtactatgaagatttcggttcaaaaagagatcatgacttatttaaagagccaaccacagctctcttacaaaattaattagtatatttgcgctaacattttaaataactaagtataataattatggcactagaaattaaagatagcaattttgaagaattgctggcatcgggcaagcctgtagtagtggacttttgggcaacatggtgtggtccttgtaaaaaaatagctccggatgttgaagctttggcagaagaatataaggatcaggtaataattggaaagtgcgacgtggatgataacgacgaactgaccggtaaatttggtgtacgtaacattcctaccgttctttttatcaaggatggtgaagtgaaagataagactgtaggtgcagtgaccaaggcccagctggaagaaaaaattaaagctttactgtaataaaaagaatattcaccctttaatatatacgactatgggaatggaagacgatttcttattggaagatgaggatgatcaaaaaacgatagagtttatcaaaaattatctgcctcaggatttgaaagataaattcacggaggatgatttgtattatatccttgatgtgattgtggattactatacctccagcggatgccttgatgtacaacctgatgaagagggatacattaatattgatcaagatgaaattgtgaattacatagtcaaggaagccaagaaagacggaatggggccttatgaccccaatgatgtattctttgtagtccagggggaaatggaatatgggaattcattgggacaggtagattaagaagatagtctcataataaaataaaagatgcgtatctccagctagggatacgcattttttatatttgaaaacaaggtaatatctactattagctctcttatttcttttgtaaaagaaaataatagaatacctttgtaaaaacgctcatgctcattttaactataaaaacattgcttaatggctaaaaagaaaaattcccaattcctacctggttttttggaggatatcatgtctttattgactccggaagaacaagaaattgcatttgaattgtttaatgatggagtcaatcaggtagatgaagaactgtctcatatttattatcatcatcagtgtcccgattatagattgattgcacagccagtcgcatcttatttgatgcctttgtggacgatggatgatatgagtagtctgtcaccggctgaaatctactcttcttgtgctgttattccacaagaaacattggaacgagatctccgtaattttatttttaacatctttgtcgtatatcggaaaatgcccgaaaaatgttattcatatagaatgtggtatgcattaggaatgatggagcattttcgtatggaacgttgtttggatattgttttggaagtattgcggcaagacttggatttctatgatttttatttcggttatttgtatgaaacaatgttgtctgctataacctatcaattgggacagaatcaattagatgttttgatggactttatgaaagagcctggattgcttcctatgtctaaatatagagtgattgaagcggttgctcatattgtgataactcatcctgccagaagagaggaagtgatggattggtttggtaatttgttgggttattattttgatatactgaaagatcagaagaatgatatttgttccactttgctgcttgatcatgttacagcttgcatgatggatattcgaggggtagaaactttacctattttgcaaaagatttatcggacttatcatattaaaccttatggcattccaagtattaatgaactaaagaaaaaaatgccttatgcggaaatgcatgggttggaaatggagcgggtagaagattatttagctgaagtttttgaggctgctactgatgaggacgaggatgaggaaatttacgatgatccgctttacatagaagatcagcctgctaaaaaacttagaataaaaatagagttgaaagattctgaaccgttagtttggcgcatattggaggtcccttcgaatatttgcttggaaagattttctgaggtggtagaagtggcaatgggatgggatggttatcatttgcatcgttttattaagggggacacttattatcttcctcccaaagatcggacaggtgattgtttttttgaaggtgcactcaaacagtttgattccggtatgctttctttaggtgaattattaagtcgcaagggatcaaagattaagtatgaatatgatttcggggatagttggatacatgaaattatattagaatcctgtcagtcttataagaaagaggaaattccggttattgccttgttggatggtgaaaatgcttgtccgccggaagattgtaatggcatatgggggtatagggaaatgctgaaagctttagaaaaacctcgctccaaagctgcgcgtgaatataaagaatggttggggtataattttgatcctacagaatttgatcttgatgaaactagagggctgttggctgaaattatagattgatttggaatttggttataacagggcgggtgaaaatcccgctctttcctgaaaaaagtgttttatgtctggtggatagggaaatttaatattcacagattttgtttactatgtgtttatacgatgccttgtacattcaaaaagaaatagattcctgtagctatcattaatagtcctaatatagcatagaaaagtcgtgcacgctggcgccctgcattactgacaatgaactgtgtgttgtgtgcggtaaagaaccactcccaattaaataaggctgccagaacggacagtagtcctaccaatacgaatatggcttggatcagataatgcattcccataatttaatgaatttggctgtaggggcagattatgttcgtccctacagtggatattttcttttattcagcttcaaagcgcatgatgcggcttccatcttcagattcttcaatctcgacttttacagcattgccaggcaagagttcttctaccagttccggccattcgatgaagcagagggcaccgctatagaaataatcctcatatcccatgtcgtatacttcgtccagtttcttgatacgatagaaatcaaaatggtaaataagttcgtctgtttcatccgaacggtattcattgacaatggcaaaagttggtgagttaatgacatctgttacccccagctcttcgcatacagctttgataaatgttgttttaccggcccccatctttccgtagaaagcaaaaacggtattgtcacccatggctgcgatgaattgtttggcagcttcgtggatagagtttaaagaattgattttaatttccatattcattggtttgattgagtttcttttgtttgtaaagatacatgcttttccccattttacaaaaagtatagataaggattgaaaaaaagattatcgctgcacccgaaggaacttgtaatttataagaaatgaacagtccacctaaacaacctgcataaccaatgatgacagaccaccaaataattttcttgaaactatgggtaaacaaattagcggtcatttgtggtaaggtcagcagagaaatggcaagtactatacctaccatgcggagacatgatacgatggtcagtgcaatgaacatcattagaatatattcaaataaagctaccggtatacgttgagaacatgcgaattcccggtcgaaagcgatgcaaatgataggatttagaaataaagtgaaaaatagtatcaacagtatggaaagaatggcaagtaacaaaatatctgtgggcgtaatggtcagaatgttaccgaacagaaaggcggataaatcgggagtgaatcctggagctaaaaagctaaatataatacctactgccataccaaaagtccaaaacacagcgatagcagagtcttcgcgcatatctttccgtttgcttaaccattctaccccaaaggaagagagtacggagaagattgcagcagataatagaggagagatgtctgcgtataatcctagaccgatacctccaaaagaggcatgggtaattcctccactgataaataccaaacggcgcgtcacaatgtatgtgccgataatgccacaggcaatgctggcaaacaagcttcctagcaaggcatgttggaagaaagtataatgcaaaagttctaatatatccatactgtattcttttttcagtggtttttattcaaatggaggctttgcttgatgtagggcggattatttgaatcttcgttcacctacaatcaggaaaagttcgtctttcaactcgtctggcagttctactccacgtaattgcaggctacggctccatccggctacctcatcttctttacaagtgtacatgatttctcgaaattcttccacttcttcttcattataaccatttgagggacggccgcgaaagcggtccagttcttcatcatcataatattctatttttttgctgacagcggcaagcaggctttctttttcacaaatttcatgttgtccacaacattcagcgtctgcttccactatttcgggagcggtcttcaattctccgctttctatctttttttgtatctggcggttgtgtaaaactcccactgccatggcgatacctgccaaaataatcagaccaataataagtatgagcataactttatatctcctctattataaaaccagctttctttaaatcttcccaatagtaaggataggattttgaaacgacctgtgggttgttaatccggatttcgggcatcactacacaaaccggagcgaacgccatagccatacggtggtcctcataagtgtcaatggcggcatcagcggtcatttcacatcgttcaccttcccaagacagaatacgatcgtctatttcatgaagtatatatcctagctttcccatttcttttatcaaggctgttatacggtctgtttctttaatcttcaaactttgtaagcctgagaagcggaagggaatattcattaacgcacaagtgacaacaaatgtttgtgccaaatctggttggttgatgaaatcataatccagacgttcggctattttatcggtctttttcaatgttaccgttttatttccataaatactttcgattcctagtaactggaaaatttcagccactttactgtccccttgatagcttgtttcgaataatcccggtaaaatgatttccgctttgttggaaagagcggctatctgataccaatatgaagctgcgctccaatcactttccacgtagaaaggtatggattggtagggttgtggctcaacttttagttgatattcattgagccatttggctttggctccaaagtcattcatcaactgtagggtaagattgatataagggcgggatataatttctcctgtcagtgtaagggccagcccgttacttagtataggggcaatcatcaatagggctgagatatattgagaactgatattgcccggcaggctgatggtatctttctgcagtttgtgtccggtgatacgcagaggaggatatccgtcattgattatgtattctatttctgctcctaactcacgtaaagcattgaccaacacctggatgggacgttgttgcatacgttgtgtaccagtgatgatccgtgttcccggagtgacggacaaataagcggtaagaaagcgcatggctgttccggctgccataatgtctatggtatttttgccgtcatttaaggcgtgaatcattacttgggtatcatcgcagtcagataggttctcaagttggaatgttctatttcccagtgcgttgataatcaatgcacggttgctgatactcttggaagaggggagctggatcgttgtatatatttgagcgggtgccgttacttttatttgcatcataccttatataatataataatgtgtatcggattgcaaaggtaggaatattatcttaatacttgaaggttgctacttaaaaaaggaagccgagagtataaaaaagccgagaacatggaaaggtggctgttttgttcccggcttggacatatagtgaaagttaagctatagtgatgcttgaatccaaataaacatcttgaatggtatttaacaattcaattccgtctttcatcggtttttgaaaggctttacgtccacttatgagacccatgcctccggcacgtttattaacgattgctgttattatcgcgtcttttagatcagaactgccatgagattcacctccagagttgattaatcctacacgtcccatgtatccattggctacttgatagcggcagaggtcgataggatgttctgaagtcagatcggtataaactttatcatttgtctttccaaatttaatggctgtaaaaccaccgttattgaccggtaatttttgttttacaatatccgctttgatagtaactcccaaatgattggcttgtccggtcaaatcggctgctgcatgataatctacgccgtcttttttaaaagcattattacgtaagtaacaccataaaatagtagccatgcctagttcgtgggcatattcaaaagcttccgctatttcaaccagttgtctgcggctctgttcagaaccgaaatagatagtggcgcctactgctacagcccccatattccaggcttcttttacagtgccaaacatcacttggtcgtaagaattgggataagtcaataattcattgtgatttagtttgacaataaaaggaatcttgtgggcgtatttgcgagcaacggaacctaatactccgaaagtagaggctacgccattacagcccccctcaatagcgagttttacaatattttccggatcaaagtaaagtggattgggagcaaatgaggctcctgctgtatgttctatgccttgatctacaggaagaatagatacataccctgtatttgcaagtcgcccgtgtcctaacagggcttgaagactgcttagggtacgaatattgcggtctgatgatatccaagtatcatcaatggtgtttggagaagggatatggattaatgatttatctatagttctacaggtgtgctctaaataaaatgctgcttggtcacccaataaatttgttattttactcatactatttttttcttttattgattaataattctttatccataatgttttctttctagtataaaggcgtatgattgcgcttgaatgcattattgaaaacactattttgatgtattctccattctgtgatggaggtttcggacagcgcaggaaaattatttcctgccgtcgggggtggtctttccttgatcggctactgcttccattagtttttttatttcttccggatctcccaaaaagtagtctttcttcaaattcaggtcatcatcaaactcgaacacatacggaatagcggtaggtagattaaggcctacaatttcctcatccggtatgtgtttcaaatatttaataattcctctgaggctgtttccatgagccactaccagcagttcgtttgctgtagctagattggggaaaatgatgcatttccaataaggtaatatacgttctactgtttctttcagagattcagtacgtggaagatctttgtcaggaacttctttataacgggtatctgttttcggattgcgcggatcgtcttccgatagggctttgggggctacgttaaagctacggcgccatatcaatacttgttcttctccatatttagaagctgtttcgcttttgtttaatccttgcaatacgccataatgtttctcgtttagacgccaacttttctctacaggtatccaatcttgatccattttatctagcacacagtttaatgttttgactgcacgctttaaaaaagaagtgtaagctttatcaaaatgaaatcctttttcttttaagagtgtacctgcttggttggcatcagcgatacctttttcggttaaatctacatctgtccatcctgtaaaacggttgtctttgttccaagtactttctccatggcggagtaatacgattcttttcatttgttctcctttctttattacccggtaatacattttctgttggcaacaaaattagttgtagcatacatacttatcaatacccattaattatgaatttaacaatggaaggcaaggatttgtttctctttttattatttttgtgctttgtaattaacacatgccatgaaaagaattaaaacaggactaacgggatttatattaggagattggttgggaatgccttacaggggaaaaggaaaagggacatttaaacctatatggacaaaatcttatcttcggggagataaatgttcagggaatacctcgatgttattatgtgctttggacagtcgttgcaatttggaactttatcagcagaatttaagaaactggtatttcaatagaaagtatacaggagaaaacattgagtttgatattgatcaggtgacccaaaaagcaatcatgaaaaatttcaggggagtgtcttcggattctaatagtggcaaccgcagtttgatggggtgttgtgttttggctttttctcctttatctaaagaggagattttttcttttattaagatcactcataatagtcgttatagctttaagtatacttggttttttattgagttcattcgttgcctgttggaatatgaagataaagaacaggcattacagcaggctgagcagagatgtgatgtggaggttaacaggcaaaatctttgtaatggaagctttgttgtagatacggtggaatcagtggtcaattggtttatggcaggaaatagttataaggagtgcgtattttcggctataaactcaggtaagtcaagtgatgcggtaggagcattgacaggtttgctggcgggaatatattatggattagaattaaagaatggagtgaaagggtttgaaacaatggaatcttatattgattcatttatccagtaccttaatcccactctttaaattccaatgaaagttgttcccattgtttttttatttcttctttttcttcttttggattagatatggatagtccgataaggcggatggggtggctttcataatcaatttctttcagtaatttttttgctaacggaagaattttatccatacttgtcagttcactgttttgagtgatgctgcgggttatttggctaaagtcatggaactttatttttaaagtaagtgtgttaccgctgaaattagtgcgtttcagtctttctagcaattcggtaactacatgatatagttcaatgatggcggaagaatgaagagaaatgtctttttccaatgtatgttcgcatcctacggacttacggattcttatgggttctacaggacggaggtcaatgcctcgtgcgaaatcgtaatacagattacctgctttaccaaactgccgggtaagcatttctaaagtgcaggcttgtaattgggtaccattatgaatccctaatgtgtgcatttttttggctgttaccggacctactccccaaaaagattcgatgggaaggtgggcgatgaaatccaatgcttggttgggatgtattgtacataatccgtcgggtttgcggtaatccgatgctattttggctagaaacttgttataagagaccccggctgaagctatcaatcccaattctttgcgaatacgctttttaatatctttggctatatctatagcaagtgaaaagcctgctttattttcagttacatccagaaaagcttcgtctagtgacagaggctctatgatatctgtataggtatgaaaaatatcatgtatctgctgggatacagttttatatacattcattcgccccggaacaaaaatcagttctgggcaaagtcttttggctttttgtgatgacatggcggaacgtactccgtaacggcgggcttcgtaactggcagcagctaccacacctcgttcttcagcgtgtcccacagcaagcggttttccacataattcggggttgtcacgttgttctaccgatgcgtagaatgcatccatatcgatatgtattatctttttcaaataaccttttatattttttgctatatttgcagatgtaattataaacacaaagataatatgaaagctgcaatttacatcagaataagtactaaaaaacaaaatacagataggcaatatgaggaactaaaatcttatgctaatagtatgggatatacaattgtagaaagttatgaagaccaaatatcaggctttaaagatgaagaagaacgccatgatttaaatagattaaaagaagatgcaaaaacagaaaaatttgatataatactattttccgagttatcacgattatcacgaaagactacaaatatattggagcttatttcatatttcagagatgattgcaaaaagagtttatattttcaaaaacaaaatctcaatgtcacaacagataaaagtgatttaggttctgaattgcaactaaatattttagcaactataggaagttatgaaatagaattatcaacagaaagacaaatgggcggaaaaatacaaaaggtaaaaaaacaatgttggacacatggaagccgcccatacggatataatatagatgaaaataaatatcttcatattaatgaagaagaagctactgttataagagaaatatatgcttattatttaaacaatatgacttctgtacaaatagcacatttattaaattcacgcaatatatatgcacctgcaacaaagaataagaaacaaaatttatggcatccaaattcagtttgtcagatattacgtgcaaaaagaaatataggtatatttgaggcaacatatcatgagcctgaccctaagaataaagataaaataagaaaaaggaaaaatagaaagatagttgaagaaattaaatatactaataaagcattagctatagttagtgatgatattttttatagtgctaatgaaaagatagataaaaatataaagaataaagatacagcaaaaaaaaatatatcattattaaaaggtttacttacttgcgggcattgtggaagtaatttcttttataagaaatcaggaagagacaaagatttttcttatgtatgttacggctcacgatattcattttcaattggaaaaaagaaatgtatcaatccaataacaattaatgcaccaaaaatggacggattgattatatatatggcaaaatctcgattattaatgagaagacttatagaaaatagtgatattaatattaaatcaaaagaagagcaattgcagaaaaatgaagaaataatattattgcaaaatctatcaataaagaaaattaatgaggaatttaatcaatacataaaaaaagctattaaatatggtattgatgataatataaccgaaaaagaacatcaacgtataaaaaaacaaataaggcaaattgaaggaaatatagaacgtatcaaaaaagagaattattcattaaataagcagattaaaatattatcaaaggataaatgtataactgatgaaatgtataatgggatgcagctaaatgaaatgaaagaactatttgaagaatatattgaaaaaatagtattatataatactacgcaatgggtaatagtaaatgtatgctattttgatggaagtaatgagttttcatttttgagaaaaagtgcaagagctaatgaattacttcattataatacaattatacaaagtgttataagtgaaaagcaatatataatgttactaagagattattatgatacacttgaaataggaaatagatattattattatccatattatagcaatataaataatgatgttatctatgataaagaaagagaagtatttatcaaatttggaacaaaaaaaggaaaagaaacaacagaatatactatttctgaatttataaaattcatttatcccaaaaccatgaaagaagttactgcctatgaatattattacccaaatcaaaaaaatgaataacatatatacatatataaaataatttactatatttgcatcattactaactaaatactatcatattatggcaaattatcaattaaagcgctatcgaaacagtgaatattacgaaaagttcttatcagagaataattataatcgtatagagtttgaaaagaaagatgaaaaagagcaagcaactgagcttagaaaattcttcaaagtgaaagaatggaagttgaaacgagaagaaaaaacttttgatgctttaaatgtacttattatcaaaataaccaacagctctaaatgtggtgatagtgaaaagatagagcttattaaaaaagctaatgaattgaagaagaaaaaagataaactattcaaactaagtgaggatattaagagattgaagaatgaaattgaagacactgagaaaagaataaaatctataattgaataatatacttataatggttacaataacgaaggtattactatagtaataccttattttttatatcttttaattaacctactaaccgcaataggagtaaacaagcaatttttagacgttctagacactgtccaaaattttgtgtaaatggaaacaggattcagctgtaagtttgttcttatatctggattctgttttcaaaaataagcataaattgattcataatcaagccccagttatgaatcggctgtgtccatttcttctcaatctccataagtgaaagataaacggtctttttgactgcatcatccgaagggaatgaaagctttgatttcgtgtactttctgatttttccgttcaggttttcaatgagattggttgtgtagattatttttctgatttccagcgggaactggaagaaaacagtcaaatcatcccagttgtttctccatgaaagtatagcataaggatactttcctccccatttcttttccagattgtcaagttctgtggctgcaacctctttgttgggtgcattatagatattcttcatatctgccgtaaactctttcttatctttataaaccacatatttacaggagtttctgatctgatgtaccacacagatttgagtggatgactgagggaatatactgcggatagtatccgtaaatccattcagattgtcagtacaggtaatcaggatatcctgcaccccacgggcttttaaatcagtcaggacacccatccagaaagaagagctttccgatttgccaacccacatgccaaggacttccttcagaccgttctgtttcagtccgacgcaaaggtaaacggtcttgtttatgatcttaccgttatcccgtaccttgaagacaataccatccatccagactatcaggtaaacaggatcaaggggacggttctgccactcctgggcagcctgattgaccttgttggtaatgatggaaatggcagatgtagagagctctatttcataaatctcacgcatctcttcctctatgtcagaaacgctcattcctttggcatatagggagataacgagcttttctatagaaagtccacggctttcatgtttaggcactgctatcggctcaaactggccgttacggtcacgtggaatagaaatgacagactctccatgttcggtttggattttcttcggataactgccatttcgggagttgccagtgttatttcctatcacagaattcttttcatatcccaaatgggcatccatttcaccttcaagcatcttttccaatacttgggcatgcaactgcttcagaaacttgctcacatcggcttctgtcttgaactgactgataaacttgcttaaaacctcatcaggcactacttgattcttttctttcataagcttcttcattttgcaaatgtataaaataaaaaatacgagactcatttctgaatcccgtatttccatttacacaaaatattttatagtgccacgttctaaaatcattttgatttagatatgatgcgatgtattgtaatgtcatatttcgctcaattaacgaactaataacagtgtatgcacgcttattattcgtattattatctgctttacgttttaatgcctcagctgattttatgcgcatatcatttgatatagttgcattaggagcacccaatttaatacctttatccttttttgcttttaatgcagcttttgtacgagagcttattgtttctctttctgattgtgcaatagttgcaaatattcctaatgttagtgtacttaattcaggtatatcacagcaataaaattttatattcgcatctttaagtgcaaagataaaagatacattacgacttaatctatccaacttagcaattactaatgttgcattattaactttgcagtaatcaattgctttgctcagttcaatacggttattgcattttccactttccttttcttcataggtgttaattaacttaccacctacactattaatataattaagtacagtatttctttgagcaactaatcccaaattttgacgtttcgttgataccctataatatgctacaaatttcatatataatacctttattaatgactatacaaatatagtatatcatttatcaaataccaaacgaacgtatgcaaattgataaatatctagctttaaataacatttgatatactgagataatctataagattgttttgtgttaatgattataaatttaattgcatattgatattttttttaatttaagtgtcaaaaaagtggtaagtttaatgcgtaggtcgtatatttgccatagtgacaagaaaatgtatgaaaggtagcattatcagttcatacctttatactctttaattgaatcgaactgatataacaactaaataataattgaaatgactaatatagatgataaatttacaccatgcccaacaactcttatatatctattagataatgattgtttgaaattgattttgatattaagccaaaaagaaacctattataaaaataaaggaaagttagaaaatggatattttcaatttgcaatggatgatatatctaaatatttgcaattgaaaaataaaaacgatataagatgtgttattgaagcgttgtattctaataaattgatagatgttatatgtaccaaagtaaaagggagacatattcctaatcaatataaaattaattgggataaagtgaatgaatataataaattatcattgtatgatattatagaatttaaacaatatatctccaaattagaaagaggaagtaaaaccacttatgataaaaagaatattgaacagaatgtaatacaagatgtgatacaaaatgtatctacaaatatagataatatagacaatacagacaataatacaaatatacttaaagataaagataatataaagaatgaaatagataatatatttgatattgagagttatattaatacttattctgtaccaaaggatataaagtcttttgcaaataatttaaataagagggctatttcatttttggataaatataacttcaacgaagaactaatagattatggaagaaaatgtattaataataaaatggaatatctaaatgaatttattgatagatttattatattagaacgtgaaagagatatataatcattccaactgtatgtatttgattgaagcctcaactatactttacgttgaggcttatttttcattgactgacttatatgttccttatgttctttacttagctttcttccaattagtgattgctttatatgctttatgtgtgttgcagtcttctttttacctcgcaacttcaaactaatcttcttctttgttatttcgttcatatattcatatatcttactatgataagtagtagataggttcaatatttactccaaaaaatatatagaaaatttttatacataaccgtattatagtagataggttcattctatattttatttaatttgagtggcgggttacattgaatattataatccaatatcatcaaaaaaatgttgcattgtaatattgaagtatttacataaagtatataatgtgctaactgttacattactttttccactttcaatccttccaatatgtatattagtatcattgtacacatcttcttgcgttaaattattcatttcacgcaatttcttcaactctaaagctactttacttattaatatttcatttttttcaatcatttagcaaaatagctgatgttttttttatcccacaatgacatatatgtcattaatttattatatttgcaccataatctcaaaatatatctaatatggaagaaaaaaaatgtcctgaatgcggaaaaaaagttggagaagttaatacttgtcctgaatgtggttgcccattaaatgtaaatagtagtgatacttcaacaaagaatgaagaagagcctctattaatagaatgtcaagcatgtaaaaagatgatttcacgtgatgcagctaactgccctaattgtggacaccaaacagaacagggattgaaaaatgaatggaacaataacatggaagttgttcttaagggaatttttatactaattggtacaataatactatacttcttatttataaaataattaatatggcacttattaaatgttcaaattgtaatgcagatgtgtctgataaggcaataacttgtcctaaatgcaataaaccaatgaataatcaaagacgtgcagcaatgaaaggaatactcctttctattatgatttttgcattatgcggtggcgtatggatatatgaaaactatttcgaattcggtagtgttgatagtgcatctaaaaatgtaaaatataaaacatttgtatgtacatcttctgatgatggagaccataaagtaaccttttatgataatacatttacgtattatattaagccaagttattctaatgaatggattaaaattaccaatggaagttatgaaattaaagaatttagttcagaaaaaaaagataaaataggtatatttgttcgggctgataaagtttctaatttatcatttttgatgatagatttaagtgatatgcgcttctattgggctgatatgtatattggaaaagcagaaatagaataatatagtaatttataaagccaagtatataagttatatacttggcttttactatttactaaaaatcaatataccaaacaacttcatttctactattactacttaattaagcattatcattattataacaatgatttaatatccaatcaattacaatatatttttatcataatagtggacggaggtctctatttactatacttgcacttttaggctacatataacacactgattttaagacatgtatataaaaggctacttgatattgataatttgtattattttgcgttcggacatcttcatgaaatttgtagagcaaaggtatgaaaaaggtttttggttgatgaactctttaacagctttatttgttatattttcattaatattatttctgtataacgagtatgagaaaggcacgtaaaaactactttatttacttgatgatgctattgatattcggagggttgatttataccgctatagcaggtggtgagcgttttttgcatttgtcatctataaagccagcgacagcaggtgatgatgcttttactatgtttaaaactatattacttgataatctggagcatcctttttccattttactcattcaaattatagttgtattgattgcggttcgtatttttgcgtctgcattccgctatatagggcaaccgggagtgataggtgagatagtggcaggaattgtcttggggccttccctgctgggatctctttatcctgagtttttcggctttttgtttcaaccggattctttgactaatctggaacttatcagtcagttagggttggtactatttatgtttgttattggaatggaggttgatttcggagtattgaaaaataagataaatgaaacattagttattagtcatgcaggaattttggtacctttcttcttgggaatgttggcttcttactgggtatatgaggaatatgcttcccagcaaacagcatttcttccatttgctttatttattggtatatctatgagtattaccgcttttccggttttggcccgtattattcaagaacggaatatgacacggaaacctgtaggaattcttacgatagcatctgcagccaatgatgatgtgacagcttggtgtttgttggcggttgtcattgctattacaaaagcaggaacgttgggaggtgctttgtatacagttcttcttacatttgtctatatagctgtgatgtttgttgttgttcgtccgtttttaaagaaaatcggtacactttattccaataaagaagttataaacaagacctttgtcagttttattttttttgttttaattgtatcggcggctattacggaaattttggggattcatgctttgtttggtgcttttatggcgggtgtagtcatgccttctaattttggtttccgtaaggtaatgatggagaaggttgaggatatagcattggttttttttctaccgttattttttgcttttacaggattacgcacacagataggattaattaatacgccggaattatggtgtgtatgcctgttattgattactgtagcggttgtcggaaaatttggtggatgtgctgtggcctcccgtttggtgggtgagtcttggaaagatagtttcaccataggtactttgatgaatacccgtggattgatggaattggtggcattgaatatcggttatgagttgggggtacttcctccatctatctttgttattcttatcataatggctttggttacgacttttatgacgacacctttattaaatttagtcgaatggggctttgcagtaagagaacaaaaaacggttttgcaacgaaaattgcttttgttctttggacgtcccgaaacaggtggtaagctattatcggtatacaaattactctttggaaaacaactttcttatcatcaggtaattgcagctcattatacaacgggtactgatgtgaatcctactagtgttgagcaattttttgaagaaagttttattcctgttgataaacaggcagagcacttgaatatacatatagagaagcgttatagagtaactgataatttggtatctgatatgatttccactgtagaagcggagtcaccggatattttgttgttaggcgcagggcctcgctttatgactgacggtgaaaagtcgatgacttctttttttggtttgtttcgtaaaaaagtggatgatgtgttagagcatgcttcttgtcctgttgctatctttgtaaatcgtgactatcgtaatggagatgaagtggctgtattgataaatggaagtatggatagttttcttttcacttatgtgcgtcgtttattggaagatggagggagttttattcatttatattatttcagcagtggaagtgaagaatatgtaggacaaatatataagataaataagcagtatgcaaatagggtacatctgtatcctttggttgaaatagaggatttggtattgccgataattcatggattgcttattttaagctatgatacttgtgtggggattgctgccaatgaaaaagtctttaaagcgcttccttctttattggtcatgaaggatgcatcttaaaaagaaactgagccgttttcaaccatcccgccaaactgccatagttacgagaattgtctaaaaagcaaaaagcattgacaatcatcagattatcaatgctttcttccagtcggggtgactggattcgaaccagcgaccacacgccccccagacgcgtactctaaccgggctgagctacaccccgaattgcggatgcaaaggtagtgctttatttttaatctgcaaataaatcgctgtaaaaatacaagtgagcatcttctatgattatcgtatatagcttgttattaatgcaatatggtcatattaaaaactattatttagacaatattcaaaataactccaagactgtttcggaggctgtttagtatcctacatagtacaaaatatatgcagaaagcctcgacttatagcaataaagagtttcaaatcatcccggaaccttaatcaaaccttaatcgaaaaacaggatgcacaattaggatgcaaacagattataaagttaatgtaggttaaagtctgtcccaatttcgcaatgttttaaggaaccttccttgttgagctattgcaatgatatagttttaatcatcgaaattacatatctttgcgatgcatccgttgaggatgccctaaataatttcgtagctaatttaaaattaatttgctatggcaagatttaaaattacgctctttaagagcaacattagaaaagacggaagctgccccgtctgtttaagggtagcaaaagaggacaaaacaaagtacatcgacttacaactgtcggcaacgaaaggtcaatgggatgaacaggcatcccgatttaaaaaagacaagcgtgtcaatcctaactacgaaaattacaatgcgttgctgaaccgttatgaagtccgaaaagatgaaatcctgcaaaagttcatggaggaacgggtaaactggacgcttaatcagttcgaggaggagtttcttggcatgtcaaagcagggtaaggtttacgactacttcatgcgacaggtggaaaacctaaaagccacaaggcatatcggtaacgcaaaagtctatgagcgtactctgcatatgctggcaaagtatgacgacaagattgaggaacggttgttttcggagttggacgtgaagtatatcaatcgttttaaccttgaaatggaaaaagacggctgttgcggaaacacccgtaaatactacctcaaaacattgagggcggttgtaaacaaggcgataaaagagcgtgaagcctcatcaaatacctatcctttcggtaagggtggctttgaaatcggtaagctggcagaggaaacagccaaacgctacctttcgccacaagatttggagctgataaaaaactcgcctcaacaaaatcctgtgttggagttatcccgtagggtgttcctatttatgtttcggtatgagttttatagacgaagccatgctgactaaaaacaatatcaatacgtttggggcagaggagcacatcgtttacaaaaggcaaaagacgcaaaacgctaaaaatgcaaagcctataaaaatacctgtaactcctgccataaaagagcaactggaatggtttaaagcaaatacagctttgacaggtaattatttgctgccagtgattacaagggattatgagggggagcaactgtatgaccatatccgcagccgttacaaacgtataaatgacggtttaaagcaattgggcaaattgcttcatatccgtatgaacctgaccacctatgtcagccgtcatacgatggccatgaccttacaaggcaatgatgtcccccgtgaatttatcagccaagcgttggggcatcgtaatcttacaacgacaaatgtatatcttgacagtttttcaacaagtgtattagacagagtagctaaaatcctttaattatgagtatgacaataaatatgcctttgggagacttgatagacaagtctcccaaaggggaagcccgttttgcgcatgaggaatggttgcgcacctatgtaaaaagactgacgaaaggtaataagacaaagctaaaacaggctttaaatgaggtggatgaggctataaaccaatggcggaacggcttcttcatatccacttatgatgaaaagttatcagccgtccgacaaggcaaacagaacatggacagccaagagttggaagatgtctataacgaggaaacctatttgcaaaaagagggtaaaacaggtttggttgcagatttcctgtatgattccatagcccaatacggctttatcaatgaacaccaccgtgatgcgatagagagcgcatggctgtttcacgacatggagtttttgcaacagcaatgggaatattacgctctggctcaaataaggtcgttgcgggcagtcattgtttccatgctgggaacagtaccaacgacacctgaaaccgaaccacagaatgccaaaagagagccaaaacggatagaggattatcccgaagtgtttgacattacactttattgtgaacttacgaattatgcaaaggatactatttacaagtggacccgtacccgtgaaataccttgtcatcgttccgggacaaacggacgcaaacttgtgttcaagcgtgacgaaatcgtagcgtggatgactgctcgaaagtaggaaaccaaggacgaatttataaaacgaatggaaagctagttggctgcacggctccgtaaatagttaatatgctttattatgtataactttctatatacattccaatctcacaaccatgtatgacaaaatcaaattaatgctatatgacctgccaacagggtacaactggcaaacagtcctgcaacgtacagttgactattttgccaatggtacaggtggtaaggggtattggcttggacgtagagtcatagttatagacacgtatgtgtcattcgagggcatgtctatgaaaacataacctaaagaccttatcattaaaggaagtagagggacttatatgaggttaagtaaggatttgggtgtgcccatgtataaggcagtggtggagtctgcggagtttgcacataactttagcatgacagagcctcctattatgtatatgcagaagttggatgctatgaaagcatttagacctaatggttggagtggtactaaatatatggataacggggaagtgcgttgcaagttttatgacaaaatacaggaaacgaagaagaagcgtgaactgcctaaatatggaagagagaacttgccaaagaacttattgaggtatgaggtgacatttagcaccaaaggactgagtaggttgtttggcagggatatagtagcagaggaactttggagtaaacaggtgttttggacgctggttgcagagtggtttggatattatgaggatatggtgaaactgcctaatgattgttgggatgcggattaccgtatttttgagagcgccaaggactttgccaagtggtgcatttgtatagcaaatgccgaccaaaacctgtcttattatgtaaagcacgtcctttttaaacttcggacaaatccgcagccagccgaccgtgtcctacgtaggcaaatacaaaagaaaatctaggaagcgttggagtggggcaaaaaacatttggctctccctaacctgaccttggaactgacaggcaaaatagaacaatatcttgcttggctgttggagcagtcggcagacaggatgggcatcgcggaggaacgacgaatattcaacaccgctgttaatcctcttcttattcaaataagacttggtaatcatcagagagtgtaaacttcacttcctaagtttattcttcagatgattaccaagccttatcttttaaatgaggtgtctattgggcgtgcacggccaaaaacttatctaacacaataaaagtactcggcaggatataaaaataattcgctaatattgcgaattgtgcaaatatgtgttatctttgtgtcatcaaagaacggttatatgaacgtagaatttgaaaaggaatatttggcagaactttatgaaaaaggaaaaactgatgataagaagcatcgtttccaacctcaaatagtcaatggttatttgaagtgtgtcaaagctctactaaatgcctctcgaatggaagatttatatcagtataggtctttaaactatgaaaagttgaaaggtgataaaaaaggactttcttctttacgcatcaatgaccaatacagattggaatttaaggaaatcaccaatgcgggtaatcaaacaatcatagaagtctgttctttgatagacattacaaatcattataaataggaggaactatgggtatagcaacaaataatttgcagtcattccgtccctatcatccgggtgaattgataaaggaagaattggaatgtagaggcataaggcaaaaagactttgcaaagagatttggcttgtcttattctgccttaaatgaaacattaaatgcaaaacgtccgataactaccgaatttgccttgtttttagaggcggctttgggtgtcaatgccgatttgcttgtaagaatgcaaacggattataatatacaggtagcacgaaagaataactccttgcgtgaaaagctaaacaatataaagaaaatagctgccgtgttttgaaaacagttcttggtatgatattatagaaataaagtttttaacgaggtatttaagataaggtggggcaagctgctccacccttattgtttgctcctctaagagtgtaaaaaagagttcctttgtactcgaaaatacttgtttaatagattgaaaatcagtaatccaataaaaattagcacaaatatttaaatctcggtcataaattcttcgttatattcatgcaacttataaaaagtttggtatgagaaattaattgtatttgtgttggaatagttatcttatacgtgatgcccctaattgtatatcagcgtgttattgtaaaatagttagtgatatacataagtaagttataatattaaaaaatgagattatggaaaacaaggaagtacaggcattagattctgaatatcttttgtcgttaatgaaacaggctaatacggataaggatgctgcatttgagttaggaaagtagtacatgaatggcacaaaaattcctcaagatacccgaagagtactcttttattttcaacaggctacagatttggggcattctgagtcacaaatgataagtggatatctgtataaagtaggagcatgggatttgaagccagaccctttaaaagctgccgaactctttgtgtgtgcgtcaatgacaaaccccagtgatgaaattgtatagtgggaagctataaatttattcttatatggtttggaggaacacctctaaatgaatatagaggtgttagtctgttggtgtttatgagccaattggaaattccctatgcaatgtatttgttaggtaaggctcatgaaaacggtttatggggagtgtctaaagacaaagacgaggcgataagattatatcgtgagtctgcgaatttagggtgtactgctgctatgctatttcagccttaaaagaagagccttttgtggtgactgaacaataagcagagaggaggtgattatttgctttaccacttatttaatgtatttggaaaattcttcaatgcaataatgcaaaatccgcataataaaaggcaatagtcggataaaataagccaagtttcccgaaaaccttattcgtaaggtatccacaggtaaaaaataaggagttaagtatttatttaactccttgatttatatattattgtaattttattatcggtaatcttattcaatttccccagacgcgtactctaaccgggctgggctacatcccgaattgcggatgcaaaggtacggcttttttgtatttgcaaatattctctgtacttttttacattaaaagtacatctttttatgcaaggtattgataaaactaataagtcgattccctatattcagaaggagacatattggtgtgtcttttaaaaaaacgacctaaagcagactggttcaggaacttagttctgattgttatttcctgaatattaagagaactgtttttcaataattcttttatctccagtaatgaataatctataatccagtccttaggagattttccactggtttctttaactacttcagacaaatatttggaagaaacatgaagtttgtcggcataaaagataacctctttatgttctctgtagttatccatcattagcgtgtagaatctatgtgttaaatcttctttacgtgttgtacttgtattatttctatgattgatataattttcaaagtcattatataaatctaggaatataattcttagcagagctataattgcttctctggaaaaacttttgggaagtttgctccgactcttcagtaatgcataataattcatgaaatactgcatctcttgttccggcaagggataaaggaaacgagatttcatgtaagagaaaaattgaggagaaaaacttctgatagtttttattacatcatagaaaaatgtgtttgaaagtgtaaaatagtttgttgtgaaattagtacttgtctctatgactgagactagcaatcccggcataaagacaaaaacatcatgtggatgtatagtatattcttgagaatccattcttattttagcatttccttgtatacagattccaatagtacatataggggtataagaggggcaatctgtaatgggcaatgttgatgcatcagattgcatgcaaaattcattctctaatatatcttctctattcttttcaaattccttatataacatttataccaaccaattatagtgcaaaaataggatttctgaagcattgaaaagttgatcaatggtatttaggaacaattttacggaaaaaaagcactttgtatttgtcttttttaaatgataagcttggttttttaactaatatatcataaatactctaatttcttgattgttaaaagtttgcctgagcataattggggataaataaaagatgttttttattgtatcggacagatggaaagattgtacaatctttccatctgtttaaagggggatcagcaacccatggattcacgataaaaatccagcatttcaaaaatttcgtctttacttgccgattggttaatctgtatatctcctatttcagttaatagggtgaaattaatgatgcctgctgagttcttcttatcatgtttcatgaattcatagaggcgttcatattgtttgcaatcaaaaggcataactccataatgttctttgatgaacaagatggtttgacgtagcttgtctttgggaaaacctgttttgatgtgggagaaataaagttcacaaactatcccccatgccacagcgtaaccatgtaatataggatgctgtgtctctaatgccagactttcgaaagcatgccctacggtgtgtcccagatttaaagctttgcggattcctctttcaaaagggtcctgttccactatattttctttaatctgtacagattttccgactaaagtctgtaagaccttgtaatctatattgttgaagtcaaatctcagcaattctatccaatgatcatgggtgctgataagaccatgtttcaacatttcagcgtatccggacaatagatttcgaagatccagtgattttagaaaatcagcgtcaatcaatacactttcggcaggggagaagactccgatctcattctttaatccgttgaaattgattccggtcttgcctcctacagatgcatcaaccatagccagtagtgtggtaggaatattgatatatttgatccctcgtttgaaagttgatgcggcgaatcctcctaaatctgtaaccatccctccacctaaattgataagtaacgaatgacggcttgcgcctttatctcccaactctttccatacatatgccaatgtttccaagtttttgtgcacatcttcggcccctatataaataaaatgggcatttttaatacaatcaaatccagataaaacaggaatgcaaagtttacgcgtatgttcatcagccaagacaaataatttgtcatgtgggcattgggttattgccttattgagattttcttctaagttatggcagataataacttcttgtttactcatattttctattatttgcctgcaaatttaggtaaaaaagcaaaaagatgaccgttctttgcttacaaataattacttttgtacgttaaaatataaaataatgaaaggaattttaccggtttattgtaggacgatgggatatgttgttctgttgttgtctgttttcgtaccgttgctcatgtttatgtttggcatgataaatgatagtaacttgttgtttacaaaggcttctatcaagttacttatctggttttctctgtttatgatcttcttggcaaaagtgaaggatgagaatgagaagatttcccgaatacgtgtcaaggctatttgttatgctatttatttgctgggcatttattatattgtaatgttggtcagaggagtatataatggaaatctggaagaagcggataattccattgctatagtttatatggcttttaatgttatttgtctggaatttggcgtacaaaaaagccgggttgaccgattatttaagaaataaatacatttttccgttaaaccttttgttgacaagagtgtccaaaggacattaggcattaaaatttcaaggaaaaaaatgaagaagttaatattattgttgttactggtatgtacctgtgcaactctctcttgggcgcaaagtggcaagcgcataaccgtgacgggatctgtgattgatggtgatgataaaagcccggttggacaagctaccgtacaattactttctctacccgatagtacaatggtggtaggaaatgttaccaataacaacggagtattctctattgccgcccgtccgggaaaatatgtacttaaaatttcatttgtaggttatcttactcaggaaaaatctttgcagctgacagctggtaaaccgagcgttaatattggaacggtcactttacctaccgatgctatcatgttgggtgaggcagttattgtagccgaggctccgcaagtaaccatttcagaagatactattggttataatgcttctgcttatcgtactcctgagggggcaatgttggaagagttagtgaaaaaacttccgggagcagaaatagatgacgatggtaatatcaaaatcaatggtaaggaagtaaaaaagattatggtagacggcaaagagttttttggtggcgatgtgaagaccggtttgaagaatctgccagtcgatatggtggaaaaactgaaaacatatgataagaagtccgatttggcacgcattacgggtattgatgatggtgaggaggaaacagtgctcgatttgacggtaaagaaggggatgaatcagggttggtttggaaatgtggatttggcggccggtacggaagaccgttatgcgggaagagctatgattaaccgtttttatgataaaactcaattctctattattggttccgccaataatgtgaatgatcagggattttcgggaggaggacctcgttggaggcgtaacaatggattgaacgcgactaaaatgctaggagcgaattttgctacagaaacagaaaaaatggaagtgggaggtagcatgcgttacaactatcgtgatgcggatgtagtaacagtaggatcttcacagcgttttttgcagtcgggggattcttattccaattcaaacaaagccgatcgtaataaagtgactgatttcaatgcggattttcgtatggaatggcgtcccgattcaatgaccaatattatttttcggccgaatgtttcttataataaaacaaaagggacttcggcaacagaatcaggaacttttaatgaggacccttaccaatatgtggtaaatcccaatgattatctgaactttaacaatataggtaccgatgacccgttaagggatactcgtattaatgctaccaatgaacacaatttgtcaaaatcaaatagtttgtcggctaatgcaactttacagctgaatcggaaactgaatgataaaggacgtaatattacattccgtggttcgtttggatatggagatgatgacagcgatcagtatgctcaatcggaaacccgttattatcagataaagaattatttaggaggggactccattgaatatcgtaatcaatacattacgatgcctactaaaaattataattatacagcacaatttacttatagcgaacctatagcacgggctactttcctgcaatttagttatagattccaatataagaatagcaagagtgataaatcgacatatgatttggggtatccttggaatataaatgacggattacccgaagactatgaaactgcttatgtagatagcttgagtaaggatgctgaatataaatactttaatcatgatatctctttaggactacgatttatccgggagaaatatcagttgagtgccggcatgtccttacagcctcaaaatacgaaattgtcctataagaagggagattacatgactgataccacaagaacggtattcaattttgctccgaatctggattttcgttatcgcttctctaaggtaagtcagctgcgtatcacttatcgtgggcgtagtagtcagcctagtatggaaaacctgctgccgattgtcgataattccaatccgttgaatatccgtgtgggtaatcctggtttgaagccttcgtttgcccataccatgcgtttgttttataacacttataatgccgagaagcagcgtgggataatgacccatgtaaatttcactgctactcagaatagtatcagtaatagtacgatatatgatgagaatacgggtggtactacttcaactcctcagaatatcaatggaaactggaatgcgtttggtatgttcggttttaattcggctttgaagaataaaaagtttactataaattctttttctcgtgttaactaccggaatcaagtagcgttcttatacaataaggaaacattgcatgatgataagaatacgactaccggcttgactttggcggagaatctgaatgggtcctatcggaatgactggtttgaattttcattgaatggttctattgaatatacagcggaacgtagcaagctgcgtcctgaaaagaaccaaaatccttatacattctcatatggagcgagtaccaatgtcactctaccatggcagatgacattgtctactaatattaccaaccagtcccgtagaggatatgatgatgccagtttgaacaataatgaactgatttggaatgcccaaatagcacaaagtttattgaagggagcagcaactgttagttttgaaatgtatgacattttaaaacaacagagcaatatcagccgttctttgactgcagatgtacgttcggttaccgaatacaacagtatcaatagttactgtatggtgcattttatctatcgtctgaatatttttggaagtaaagccgctcgtgacaagatgatgaatagccataggggattcggtggtcccggttttggtcccggtccaggaagacatggccggcgtcctttttaaaggaaactatatcttaatcttttcccaatctatattgttataggttgggattttttttataagtttgcttataagtaaattacttggaattatatggtagagtggagtatctttaatgaaatctttgctgttgcttttaacgtgctttattttgtgattatcatcggaactatctttatagtgatacttgataatcgtaatcctgttaaaacaatggcatgggtacttgtactctttttcctgcccattgtggggcttgtattctatttctttttcggcagaagcacacgtaaggagaaattgatcagcaagaaagggttcacccgtcttataaaacgtcctatggcagaataccaagcgcaaaaggcgtttaagtgtcctgatgaacagtaccagttgatgcgttttttccggaaagtgaataatgctttgccctttgaaggaaatgcgacggaagtttttacggatggttattccatgctgtattcattgatgaaagaaatcagtaaagcaaagcaccacatccatttacagttttatatttttgaggatgatccggcaggcaggctgctgcgcgatgtgttgatagataaagcgcggcagggagtagaagtgcgtttactatacgatgacgtgggctgttggaaagttccccatgctttttttgatgaaatgcggggagcaggtattgaagcacgtagttttttgaaagttcgtttccctttatttaccagtaaggtaaattatcgtaatcaccgtaaaatagtggtaattgacggtcgtgtggcttatatgggaggaatgaacattgctttgcgctatatgaaaggctttccatgggggatatggcgggatactcacattaagatagaaggaaaagcggtatatgggttacagactgcttttttgaccgattggtatgtggtagaccgtactcttattacttcctcccgttatttccccgaagttggaatctttgggaaggctcttatacagattgttacttccgatcctgtaggcgaatggcgggatattatgcaagggttactgatagctatcagtagttcccgaaaatatttttatatacaaaccccttacctgttgcctaccgaacctattctgatggcattgaaaacggcagctttagcaggtgtggatgttcgcattatgataccggcacgtgccgatacgtggataacacatttaggttcgttatcttatttggatgatatcatgcgtgcgggtgtcaggatttacctttatcagaaaggttttttgcattccaagttgatggttagtgatgatactctctctacggtaggttctactaatatggacttccgtagctttgagcataattttgaggtgaatgcctttatgtatgatccggcctcagcattgatgttgaagggtattttcctgcaagaccagaaggacgctatcctgttacagagaaaaacatggatgaagcgtccttggtatcaaaaagcacaagaatctattgttcggttgctggcaccattgctttgaagaaagagaagttcacactgccatatacacggcgctcaataaaatggggattatcctcgaaatggttctctttgccatgttccaataccaataatccgtcttcctttaaaatcccgctttcgaaaatacgggtggggatactttccagatctttcaaggcgtatggaggatcggcgaagatgaaatcaaactgctcgctgcatttgtctataaatctaaagacatcagcacggataggaaaacatttgtcagtcttcacttcacgcatcacctgcgagatgaaagaaagatgctggggatctttttccactgagataacccggtcacaaccgcgtgaaaccagttctatactgatgctgcccgtaccggcaaaaaggtccaaagctgtaactccgttctcgaagtcaaaataattattacttaatacattgaaaaggttctctttggcaaaatccgttgttggacgtgccttgaatgtatgaggcacgtcgaaacggcgccgtttgtatataccgctgattactcgcataataataaggtttgcatgtcaaaaggtatctcttctattttacttatctcggagcggttgaattccgctttggggttgatgacgaatacctgacgcagatagttgcgcaattctttcaataattcttctttgtcctctaattttcctgtcaagtgcagttcgtctttttcctgattataatttaattgttgccatatatataataggtaatacacacggtctgtggtttgtttgcatggaaatgagttaatcagtaataagttgcccttatcaaaacaaaaaacttccatttgttgctcgcgtatgtgtgtgtatagtttccggctgttgcccaaccggcttttccgggcgaaatattcagtcagcgggctggcggtggagaagtaacgagctgtaggaaaatgttcagtcagtaacaaatgggtatgtttgtctatagcaaaaagtattaccacattactccttcccaggacattgcaaagtacaatctcgttatttcctttaggaaaattatgatagaaaacagtatccatttgttcgtcttcgaataattctaaaggaacaggtgtgaaacggggggagtcatacagaatgttaacccgtttatacggatatcttagagtttctgtctcggttaacatttcctttagattagccgtcatagagtatccggtattgacaggatacggaacaaagcagaaatcattatctgtcagtgggttatagatagaaaaagaaaatccatccgcactgaggcggatggataatgtatattgttccgattttgtaaaatcgatacgttcagtcattcttattcccagttacctgcgttattgttaggctgttcgatatcacccactcttaaaccgcaatatttgcccagtttggtttgaaggtctttaaggttagccaattcttgagcattcaaaccacccaaatatgtttcatacggagtttgagcttggaataaatgcaaaggggcacctgattttgttgtatcgttacggatagccatttcaaactgtgcaccatttccgaaaggaacatatcttaaagagtctgcattgaatcccggagcatagattgtatctgttacggcaacccataaagtatcacgtttgaagttcattaaaccttctttttcaacttctttccagttaccagtttttttggctttgttgatgattgccatagctttcttttcagtcatgccagcttccagttgcgtatcagacaaaactccttctttctttacaaatggaagttttgcagttttgacgaaatcaatcaaggtgtcgaaacttgcagtgtattgtccgttgtgcaggttgcggtattccaactgtgccttacggatgtcaattaagcgtgcaataacttgtttctctctagcttttttagcgtcatcgaagttaatcggtcccatgatactgccgtagcaaacgtatatcaaaccgataacgcaagcagccaatacaatattaataactgttttcatgataaatatgtgttttttttagtttatattcgcatcgcaaaaataaaacaaataaatctaataacgcacagttcaaggaactttttattacgcaattatgattaatagttatttagtgcagcaaattaagggaaattttctatataaaccaactttagaacaagaaaaagctgttaaatttttagcagattttctcttttctcaccaatcggactcggtttttctcttaaagggatatgccggtacgggtaaaacatcccttatcggggcattggtgaagaccttggaccagttacagcaaaagtgtgttctacttgctccgacgggcagggcggctaaagtcttttcacattatgcacagcatccggcttatactattcataagaagatttaccgccagcgcaacttttcaaatgacctggataacttttctttggatgataacttgcatcagcatactttgtttattgtggatgaggcgtcgatgatcgctaatgacggattggcgggggcagtctttggtacagggcgtttgctggacgacttgattcaatatgtatatgccggaacaggttgccgtttgatgctggtaggggatacggcgcagcttcctccggtaggagaagaggagagtccgtctctttcggccgataagttacgcgggtatggcatggaagtatatgaggtgcagctcactgaggtggtccgtcagatgcacgattcggggattctttggaatgcgacagaattgcgccgctacatatccgcggaagattttctcactttgccttctgtccgtgtggaagggtttccggatatccggatggtttctggtagtgagctgattgaggttattaatgattgttacggtcaggcaggtatggacgaaacgattgtggtctgccgttccaataaacgggcgaatatttataataagggaatcaggaatacgattttgtttcgggaggatgaactgaacagcggtgacctgctgatggtggcgaagaataactatttttggacggagggctgtaaggagattgattttatagccaatggagatatagctgtaattcgccgtgttcgtcggatgcgtgaggcatacggctttcgttttgccgatgtggtgctggcgttccccgactatgatggtatggaactggaggtgaaacttttgttggataccttgcatactgaaacacccgcattgcctaaagaattgaatgacaagttattttattcggtattggaggattatgctgatataactgtgaaacgtgagcggatgaagaaaatgaaagccgatcctcattacaatgccttacaggtgaaatatgcgtatgccgttacttgtcacaaagcgcagggtggccagtggaaacgggtctttttggatcagggctatatgacggagaatatgctgactccggattatttccgttggctgtatacggctttcacccgtgctacggaaattctgtatctagtgaactggccgaaggaacagacggaataagcagacagtcagtgaggtgttaatgactgattatatgcttccagccgtttggttagtttttttcccttatggctaagcttttttgaacgtttatgttctatctccataacctttggagttaactcccaagcttatggagttgactccaaaggttatggagataactccaaaggcttgggagataggaatcttcttttctgtttcccttatccatagaggagaaaaggcttagtgaaccagatgaaaaaaactccgccaccggctttcagaccagaatggcggagttttgatatacgaaatatggacgaaattcgaatagattacaatgcagccagctctatcactttatcaacagccgcattcaaaccgtcaggattcttaccgcctgccgttgcgaagtggggctgaccaccgccgccgccttgaatcagtttggctgcttcacggaccagtttgcctgcattctgtccggcttttaccaggtcttcgctaatcatgacagtcagcatcggtttgttattgtccacactgcctattacaacgaacagattggcaggaatctcacctttcagctggaaggcaatatctttcactacgtcggcagacatcggaataatggctttcaccactttcacaccatttatttctttggcattctctaccagtctggctttcagtgcggcgcccttttctttcatgaactcttccacctgcttcttcaatcctgcattttcgtcaatatacttgcggatggcgactttcagatcgggagcattgttgaacaatgccttcaagtcattcagcgtatcctggaccgtatccatcaattcctctactttggcacccgtgatagcttcgatacggcgcacaccggcagcaacagagctttcgctgataatacgaaccataccgatcttgcctgtagccgaaacgtgggtacctccgcagaattcaatagagttgccgaattggacaacacgtacttcatcaccgtatttttcaccgaacaaagcaatggcacccagttcttttgccttttcgataggaagattgcggtattccgtcaaagggatattctcacggattttggcatttaccaaatgttccacttcacgaagttgctcgtcagtcactttctggaagtgagagaaatcgaaacgtaatgactcaggagtcaccaaagaacctttttgttctacgtgagttcctaatacctggcgcaacgcttcgtccagcaagtgagtacaagagtggttggcggcacaggcggcacgtttttctgtatctacacaagccatcatcggaacgtcaaggtgttcgggcagttttttggtgatatggataggaaggttgttttccttcttggtatcaatgatttcgatggtttcgaattcgcttacgatcacccctgtatcacctacctgaccaccactttcggcatagaaaggagtatcgctcagtacaatttgatacagtgtctggtttttctgcttgatctggcgatagcgcaggatgctggtttcatattcggtaaagtcataacctacaaagtgggtgtcaccttcctttatggtgatccagtcgccagtttcaacggctgccgcgttacgggcgcgttctttttgtttctgcatttcggcgttgaactcttcttcgtttacagtcatgccgttttcgcggagaatcagttctgtcaggtcgagggggaaaccgaaagtgtcatataatgtaaaggcatccacaccgctgatctcttttttcccggcagctttggcatcgttcatagtcttgtccaacagacggatacctgtttccagtgtgcgcaggaaagattcttcttcttctttgatcactttctcgatcagtattttttgtgcgttcaactctggataggcctcgcccatattctcaattaatacaggtagcagcttgtacatgaatgcttgtttctgtcccaggaaagtatatccgtaacggacggcacggcggaggatacggcggattacatagccggcttttgcgttactgggcaactgaccgtcggtgattgagaatgcgatggtacggatatggtcggctataacgcgcatggcgatatctttctggttgtcttggccataggtggttcctgccatttcggcgatggctttcagcatcggttggaacacgtcagtgtcatagttggatgtcttgccttgcagtgtgcgcaccaaacgttcgaatcccataccggtatcgattactttggcgggaagaccttccagtgaaccgtctgctttgcggttgaactgcatgaatacaagattccagatctcgattacttgcggatgatccttatttaccagttggttgccggggatttgagctttttcttcttccgaacgtgagtcgatatggatttcagaacacgggccgcagggacctgtatcacccatttcccagaaattgtcatgtttgttgccattgaggatatggtctttcggcaggaactgttcccagtaagaggcggcttcattgtcccgttccagtccttcttcgggacttccttcgaatacggtggcatacagatctttcggatctattttcagtacatctaccagatattcccatgcccagccgatagcttctttcttgaagtaatctccgaaagaccagttgcccagcatctcgaacatagtatggtggtaggtatcatgtcccacttcttccaggtcattgtgcttgccgcttacacgcaaacatttttgtgagtccgcaactcttttgtatttggccgggtgattgcccagaataatgtctttgaactggttcattcctgcattggtgaacatcaatgtggggtcatctttaatgaccatcggagccgatgggacaatctggtgtcctttcgactcgaaaaagcttttgaaagaatctctaatttctttagctgtcatcatgtcgcttaatatattgtcttctagttaatattctcaaaaaggatttgcaaagataattggttttattatttttgtcgacaagaattgtgcaaaatattgatgtgttgtgcattaaaaacttcaaaaagcagaattagatgcgtaaagtctactatatttataatcctaagacccgaacttatgaccgcatttaccccacagtgaggcagcgcgccttaagcatcttgcgccgtttgtttgtaggaatgggcttgggggcaggcagttttattattttattattgatctttggttctccgtccgagaaagagctccgtatagagaatgctcgcttactggcccagtataatgtgttgtctcatcgtctggatgaggctatgggggtgatgcaggatatccagcagcgtgatgataatttgtatcgggtggtgttgcaggccgatcctgtttcggatgctgtccgtaaggccggttatggggggacaaaccgctatgaacagttacgggatatggcgaatgccgatctggttatcaataccactcagaaactggatatgttgaaccggcagctttatatccagtccaagtcttttgacgaggtggtggatttgtgtaagagccatgacgagatgctgaaatgtattccggccatccagcctgtttccaataaggatttgaagaagacggcttccggttacggtgtccgtatagatcctatttataagacaaccaagtttcatgcggggatggacttttctgctagtccgggcacgccggtgtatgccaccggtgatggtgttgtggtgaaggccggatgggagacaggttatgggaataccatcgaagtgaatcatggctttggttatcttacgcgctatgcacatctgagtgcttacaaggtaagaccgggacagaaggtggtcaggggtgaagtgattggagctgtgggaagtacaggtaaaagtaccggacctcacttgcactatgaagtgcacgtgaaaggaaaagtgcagaatcctgtgaattattatttcatggatttgagcgcggaagattatgataagatgatacagattgcagccaaccacggtaaggtatttgactagccgtgaatttttaattctcaattttaatttaccatggcctataatcctaataaagaactgaaactttactattccataggggaagtggcaaagatgtttgatgtaaatgaatccttgttgcgttattgggaaaaggaatttcctattatttctcccaagaaggcgggagggaatgtccgtcagtatcgtaaagaggatattgagaatatccggctggtctatcatctggtgaaagagaaagggatgactttacagggggccaagcagaaactgaagatgaacagagaaaccactatccgtactgcggagattttggacagattgaaactgatacgtgaggaattggttagtatgcgtaaagaactggattatctgacttaagaatattcaccacagattgcacggattaaaaacgagttgcggataatcgttatgaacaatcagtgtagtctgcggtgaaattggtattggttaattcggctggtcttcgaacttctcgatacgggtgacggtttttatctcatctatctttcttagattggtagtgatggattttacatcatccacatcgtgtacaaatagctgtattcttccttcaaagataccgtcgttactttcaatattcaacttgtggatatttacattcaattgtcgtgaaatgacttctgttaccttatttaacagaccgatgtggtcaataccttttatgtagatatttacaggaaagtacaaggattttccagtctcccattggacagccaacaggcggttgccgtaactgctcttcagtttggtagccaacgggcattggcgtttgtggatgatgatacgattattgtcgcctatatatcccaaaacgtcatctcccggaataggcttgcagcattcagctatcacatagttcttttggatagcttcgggagtcagtttcaatattttcttgctgtctatcttttgtaagggttccttctcttctgtcggtttttccttgtttgtcttgctgcctccgaaggcgaaagagatatactttttccagttactggaagtcggtttgtctttcagttcgttcttgtcgttttctcctagaatgattgtttttaatccgatggcggcaaacaattcttcctgtgttttgatggtatgcagattacagatctttcgtatattttcgggagtgtactctactccttctctggaaaagaattcccgtaacatttcctcaccggcctgctgcatgcctcgctgttcgcgtttcagtatggccaaaatcttggctttggcctttgcggtggtggcaaagtttatccacgaaggctgtacatgctgtgatttggaagtaagaatctccacctggtcgccactttgcagtttgtggctcaagggcaccagcttgtggttgactttagctccgatgcaatggctgcccaagaatgtatggatggagaatgcaaaatccagtgccgtacagttttgcggcattgttttgatttcacctttcggagtgaagacaaatatttcagaagcgaacaggttcagtttgatggtatccagaaagtccatggcatccggttgcggatcgtccagaatctccttgatggtacgcagccatttttccagttcaccctcgtcctcactgcctccgccttctttatatttccagtgtgcggcaaagccttgttcggctacgtcattcatccgctcactgcgtatctgcacttctatccattggcctttgttactcatcagggttacgtgaagtgcctgatagccgttggctttagggtggcttacccagtcgcgcaagcggtctgggtgcggtttataaatcttagatatggatacgtatatgttaaagcactcattaagttcttcttccggatttttgggacagaaaatgatacggacagccaggatatcatatatttcttcaaatgtgatatgcttggtctgcatcttgttccaaatggaataaggggattttactcgtgctatcaattgataactgatacccattttgtccagttgtgcgcggataggtgctgtaaattcacggaatacttcttcgcgttccgcttgtgtttcttgtagcttggattctatctgtgcatattcttccggatgctcatatttgaaactgagatcttccagttctgtctttattttgtttaaccccaagcggttagccaatggcgcatagatgtataaggtttctccggcaattttgtattgcttgttgggaagcatggagccaagcgtacgcatattatgcagacggtcggctattttgatgaggataacccggatatcatcactcatggtcagtagcaatttcttgaaattctcggcttgtgcggaagcccggtctccgaatataccgccggatattttagtcaggccatctacaatctgtgcaattttaggaccaaacagattttcgatgtcttccacagtgtagtctgtatcttcaactacatcatgcagtaaagccgaacaaatggaagttgatcccagtcctatttcggtacatacaattttagcaacggctatgggatgcatgatgtatggttcacccgagcgtcgttttactcctttgtgtgcttgtttggcaaaattgaatgcctttgtgatgatttctactttcttacggtgtttggtcgctagataactgtccaaaagttcctgaaacccttggtttatcatttcctcatccgcctgttcctgagtctgcttttcatccgtcatatctttgcctcctataatctatactgcaaaaatatacaaaaaacatattcaagcaagtattttcagaaaatgtatagtgttaaatctgtattttttatcaatcatctgatccgcaaactttttccggctctgatattattgccctttataccgtttagattacgtaattgactgatggatacgtggtatttggcggcaattcctcccaatgtgtctccttgtttgattttatgataaagagttcccttggatgagcggtttctgctactggttgtttctttgatagctaccgtttttcttttggtcagatattcattgggtttataagcgaatacactgtcttggcggtcaatgaaagtactgacaaagttattgggcaaacgaagtacacacaactcgctgttaccgggaataatatcctttttgtattggggattcaggctgcgaagctggtcgaggttgatgttgcatacttctgccacttgttgtaagtggaggtctttgtttatgtgaatggtgtctgtagcgttggggagctgtgtttccatgggacagatgtcatgttcgcaataataagtcatgatgtagtttgctgcaatgaaagcaggaacgtacccacgggtttctttgggcaggtagttgtagattgtccaataatctgtggctcctccggcacggcgtatggctttgttgatagtgcctggcccgcagttgtaagctgccaataccaggttccagtcttgatagatgtcatataagtctttcagataacgtgccgccgcccaagttgatttgaccgggtcccgcctttcgtctatcagactattgcttttcagcccgtatatttttcctgtacccagcataaactgccacaaaccggtagctccctggcgggaaactgcaacaggatttaaggcagattctataaccggcagatatttcagttcttgaggaaggtcgtataaatcaagtgcttcttcaaagataggcatataaaaattggttgccgcaagcataaaggatactttattgcgcagacggacggcatacatatcaatgaatttgcgtacagcctcgttgtaaggcatttctatgatagaggggatacgtgacagacgatccatatagatggaatcacttacaacagggttggtagaggccattgtgcagttctctcccaatgtgatgtaattcttagattgccagtcccagtaaagactgtccatttctgactgcatactttcaggaacatcaataatttcttcttttcctgtagtttgcgagtgaacggtaatactttgggtttgtgcgttgattcccgttgttcctataaatgtaaataaaccaattaaaaagtttttcatgcgattaaaatttgaagctgcattgcaggcctattgtattaggtatcctgctccggccatcattaaaaataacaggttgtatttgaagacctaagtctttggatatatcaaaatcagatagttcagcatccacgtatgcgtctatgacagatagtatatatacaccgataaaacagaatatgcttaaatcccgatatcggcgataaaaatcttttcgttttttaaaggtatcctccataccttccgcactcacgccatgaggcaggaagtcttcgtagcttttggtattagggtcatcgtccataatatccagataggcttgcgaatagtccttgtacattctgttgttccaggtcagcgcatatgcacatcccacaaatcctccatatactatcggcagtttccaatatttacggttgtatatctgtcctccgccgggaattaccaacgccagccagatggcacggttggagttcggaataaatcggggttttgtttcggcagccattgctttctgtatggaatcatttttacggactaaagcggcagtatcaacaggtgcttccatattttctatcttttgtcgttcttccaacaatcttaggctgtcaatgacaagtgaatctttgacttgtatgatagaatctgcctttatacccatacggcggttgcgtgccttttgggcgtgaacattcaggcttccagccatcataaggcataaaagcatgaatgtaaacactttatatgtggatgtttttcttttcaatgtagtaataacgctttattctttctttttcagtgaatccagtatttccatgattcgttccaagtcctcttcgttgttgaacggaatactgatcttgccttttcctttggctgtgcatgaaagctgtacttttgaaccgaagaatccgcagagatggctttgcagcaaagtgtattcctcggatagtttggaaccttttggtttgatcttcttcccaccgctgtccactgtctcgccactgctcagtgccttgacaatttcttccactttgcggacagaatagccttgtgactgtatttcattaaagatacgtatttgggtcttaggatcatctaaggacaataaggcacgggcgtgtcccatgtctatttcgcggtttttcaatgctacttgaatctgagccggaagtttcagcagacgcagataattggcgatagtggtacgtttttttccgacacgttcgctcagccgttcctgtgtcaatgcatattgttccaataaatgttgataagccagtgcaatctccaatgaattcaaatcttcacgctgaatattttcaatcaacgccatttccattacattctcgtcatcggctgtgcggatgtatgccggaatagatttaagtcctgcctgtatggaggcgcggtaacgacgttctccggctatgatctggtaagagtcttcactcagttgacgcaacgtaatgggttggatgataccaatttcggcaatagagtcagccaactcctgtaacgccaccggatcaaattcacggcgcggttggttagggttgacggatattttgctcagttctatctcattgatagaagatgagccggctgtctttacttcttcggtcgagatcagtgcgtcaagcccgcgtcctaaagcaaattttttctgtactgccattgtttacttactgttacgtgttataatttcttgtgccaatgccaaatgattcttggctccggtagagtcggcatcatacaatattgcaggaatgccgtggctgggagcttcgctcagtttgacgttacgctgtacaattgtcttgaataccaattcttgaaaatggcgtttcacttcatcataaatctggttggccagacgcagacgtgaatcgaacattgtcagcaggaagccttctatttccagtgaaggattcagtttcgatttaataatcttaatggtattcagcaatttgctgatgccctctaatgcaaaatattcgcattgaacagggataattactgaatcggctgctgtcagcgcattgatcgttatcaagcctaatgacggggagcagtctatcaggatatagtcatattcgtcccgcatgggggctaatacttttttcatgatcttctcgcggtcttccaggttcaacatttctatttctgcgccaaccaggtcgatgtgtgaagatacaatgtcgagtccgtcaatgtcggtggtataaattgcttcccgtatatcggcttcgttgataatacattcatagatagagcattctacctctttgatgttcacacccaatcctgatgatgcgttggcctgagggtctgcatcaataaccagcacttttttctccagcgttgccagagaagctgcgaggttaatcgttgtggtagttttacctacgccacctttttgattggctaaagcaataatttttcccatattaatcagtttttctcgctgcgaagtaacaaataataggtgattgtacctataaaaaacggcagacattagcaaaactgttgataactcattggttttgttaataactcaacggcggcaaagatagaaattttcattcaattctattctatttttagcactgggttgtagaacattaagataattttcttttctggcgaggggtagttccggcaaagagttgtatctttacgctccgagaaaaagagtggaaaaatatgaagagagaaaaaccgttgatattgctgtcaaatgatgacggcgtggaagctaagggattgaatgaattgatacgtgggttgcgtggagtgggtgaaatgatcgtaatggcgccggatggtcctcgttcgggagcttcgggggcgatcacttccgaacatcctgtgcggtattacaaggtacgtgaagaggaggacttgactgtgtataaatgtacgggtacaccggtagattgtgtgaaactggcattgcatacagttgttccccgtcgtcccgatgtggtgataggtggaataaaccacggtgataattcttcagtgaatgtgcattattccggtacgatgggggtagtgattgaagggtgcctgaaggggatttcttctatcggatattcattatgtaatcattttgcggatgctgatttctcttcatcgctgccttatatacgccgtattactgagcaggtcctggagcatggcttgcctttgggtatttgcttgaatgtgaactttccggatacggcttctttgaaaggggtacgcatctgccgtcagacgaatggggcttggattaatgaatggaagcgtagtctgcatcctcggggtggagagtatttctggctgaccggagagtttgataactatgaaccggaagcggaagattcggaccactgggcattagggcatgggtatgtggcggtaactcctacccaaattgatgtgaccgcttatgggatgatgaatgagttgaaaaactggaatctggaagtatgaaatactatttgatagtaggcgaggcatcaggcgatttgcacgcatctaatttgatgtgtgccttgatacaggaagatccggaagcagaattccgtttctttggcggggacttgatgacggctgttggtggaacgcgggtgaagcattacaaagaactggcttatatgggttttatcccggtgttgttgcatttgcgtactatctttcggaatatgaaagaatgtaagcaggacattgttcgttgggctcctgatgtagtgattctggtggattatcctggctttaacctgaaaatagccgagtttataaagaagcagacgcaaatacctgtctactattatatttctcctaaaatatgggcttggaaagagtataggattaaaaatatcaagcgggatgtggacgaattgttttctatcctgccttttgagattgagttttttgccggacatcagtaccctgttcattatgtgggtaatccttgtgtagatgcagtggatgcttattgtaagaaacatccggatgggtttccggaatttgtggcggataatggtttgtccgaaaagcctgttatcgcattgttggcgggcagccggaaacaggaaatcaaagacaacctaccgatgatgctggaggctgctgctccgtttaccaaagattatcaattggtgttggcaggggctccggggatggaccctgcctattatgcgggttatataaatccgaatgtaccggttaaaatcattttcggacagacttacaggctgttgcagcacgcgcaggcggcattggtgacttcgggtactgcaactttggaaacagctcttttccgtgttcctcaagtggtgtgttactatactccggtagggacgtttatcgcttttcttcgccggcatattctaaaagtgaaatatatttcgttggttaatctggtagccgataaggaagtggtgcgtgaactggtagccgatacgatgacggtagataatgtacgttcggagttggaagctcttctatataataaggtatataggaataagatgttggaagagtatgatcgtataattcaaattttaggtccggcaggagcttcggaggcagcggcacgcaagatggtggccttactgaagaaataaacttttcacgctgtttttttgttctttcgggtaaataacctaaaccccggaaaatatgaaatattctttttcatcgatgttaggggcggtacttctttttagcggagtattcgccttttcagcttgtggcaatgacgaaagttatcccgatagtacagtaactatagctatggctacagtagaaaagcaacctcagtatgacgctccttattttatattggataatggagagaaattgtgggtggtacagaatgctgtaccttaccgggatttgaagacgggagagcgtatctttggaagttatacctttctggaagctggtgagagtggttttgcctatgatatccgtttgaatgactatgccatggtacctgttcaagatattatcggactgaatcctgataatatggatagtataggaaatatgaaagtgcagattaaagatatatggttttccaatgagtatatgaatgtgcgttttatgctgaattttcccaatccccaaaggcctattctcaatctggttgtcaatgagatgattcctttggtaaatgacgggtatgcgcatttggaactccgctataacaataatggcagccaaggacggttggtacctggtctggtttctttcaaattaggaagttactcaccggaaaacagtgaattaaaaggattaaaggtgctggtacgtcctgtaggcggtgaagaaaaaacatatatcttctcttacccgcttactgacaagagtacgcctgattttaatcttttggatctggcggaattaaaataaagaaactacatacaaatagactactgctgcagggatagcgaggattgcgctgtcgaaacgatcgagcattccaccatgtcccggcaaaatattacccgaatctttgatacctaaacggcgcttcaataaagattccgtcaaatcaccccaggtaccgaatattactactgttaatgctagtccaatccataccccggtggacatgaagggaaagaaatgagccagtatgaaggaggatatgatgcagaatacactgccaccgatagaaccttcccacgattttttaggggaaatacgctcgaacagtttgtgtttgccaaacagcatccccgtgcaataagcccccgtatcattcacccagttaaaaataaaaatagatagtgggagaatagcattgtattgtgaaatactcgctgtttcgtccgagtggaaagccaatacattcaacaaagcaaatggcagagcgatgtacatttggcttagcatggcgtatgcccagttgttcagagggttttcttttttcaaataaagttcgctgaccatcaggtagatgaataaagccagataaggaataaatatacctgtttgtgaaggatctattccaaaataaaaaaagcacaggaaaagaaaaattccgctgagaatacatatgcgtttatttacttgtattccttctacatgattgaccaaattacagaattcattgatagccaatgcgctgataatggcaaataggataccgaaagaaacagccccacccactatgcagcctatcagtactgcaacgaaaataattccggttatggcacgttgtaagaaattgcttttcacggtcgttagtcttaagtgattcaaaaatcaaaatagaagatctgttgtttaatcattctgagtgataatgaagaacccgtatttggattactacagactctttatatcattcagaatgacatgattatgattgacagatctttctacaatgttatgcttcttttttttctttttccttttcctcagaatctgaagatttcttctcttcaaaatcttcggttacttctactggttttactgtagcttctaaagccataatttcttctgaacgtgaggtccagggacgtttgccaaaaatgcgttccacgtcttcggcgaaaattacttctttttcaaccaacagacgggccagctcgttgtgaccatctttatgttcggacaatattgcctttgcccgatcatattgttcgttgatcattcttttcacttcttcgtcaatcagttcggctgtacgttcgctgtaaggcttgctgaaagagtattcatcgttgctgtaataacataagttgggtaacttttcactcattccggcgtaagcaatcattccatatgattgttttgtcacacgttccaaatcgttcatggcaccggttgaaatatgtccggtgaacagctcttcggctgcacgtccccctaaagtggcacacatttcatccagcatttgttctttggttgtgatctgccgttcttcgggcaaataccatgcggctcccaatgcgcgtccacggggaacaatggttaccttaatcaaaggattggcatgttccaaaaaccaagacagcgtagcgtgaccggcttcgtgtaaagcaatagtacgcttttcttcggcagtcatgattttggttttcttttccaaaccaccgataatacggtctacagcatctagaaaatcttgtttcccaaccgcattcttaccatggcgggcggcgatcagtgctgcttcattacatacattggcaatatctgccccactgaatcccggagtttgacgggcgagcaaatccagatcgacactttcatccagctttaagggcttcaaatgtactccaaatacttctttacgttcgtttaagtcgggtaagtcaacatgaatctggcggtcaaaacgaccagcacgcaataatgctttatccaatatatccgcacggttggtagcggccaaaatgatcacaccgctatttgaaccaaaaccatccatttctgtcaataattggtttaatgtattttcgcgttcatcatttccacccatgcttggatttttgccacgggcacgtcctactgcgtcaatttcatcaatgaatataatacaaggagctttctctttcgcctggcggaacaagtcacgtacacgggatgcacctactccaacgaacatttccacaaagtcggaacccgaaagcgaaaagaaaggtacatctgcttcaccggcaacagcttttgccagcaaagtcttaccggttcccggagggcctaccagtaaagcgcctttaggtatcttacctcccaactccgtgtatttctgaggttgtttcagaaactctacaatttcttccacttcttgtttagcttccgcttgtccggctacatctttaaaagtaatccggttagtcttgtctcctttttcgtatacctgagctttgcttttgcctacgttgaacggattggcgcctccggcccctgctccgccgctcatgcgacgcatggcaaacatccagataccgatcaatagtaaaaacggagcgatattccaaaataatgcgccgaagtagtcgcgtttcttttcataactgatagatccggtaaagtgaccttcttcctgtgccttttccatgaatttatccaatgactccatggaacctatttctacgttcaatgctgggttacgccctacttttttatagtcatttttaaatacatctttaacaaattccggtttaatgtacatttctaccgtattgtcatcgtatgcaattattttattggcatatcccttgtttatcatatctttaaactcggtatatgttatttgtttgtcaattcctccttcttgattggaaaaatagaggatggcaaaactcatggcaatgataacatacagccaactcaaattgaagcgtggcatgtttatctttggtctattattggtattttcactcattttgattctgtattggattagtctagatcaggaatttgggtcagtttggcatctgcccataaatgttccagattataaaaatttcttgtttccggcaaaaagacatgtaccagtacatcgctgtagtccattgcaacccattctgcgtttctcagtccgtctattcccgtaggcttgtcatctatttctttatgtacatattccttgactgagtcaacgatagctataacttgacttggggaattaccttgacagattacgaaatagctgcaaatggtatcatcaatggcggtgaggtccgctattacaatgtttttacctttcttttcttgaatgccttctgttattttttttactaaagtctctgcttcgttcattataatgttattaacaactgattattctaatatatgtatttacaacaatgcacaaagatacttggttttctcattctagcgaaaaaatgtgcattaaatatattcggtttttgttttttttagttagagaatctttttattgttatgttaagcctagagtgaagatacacggtcaagaaggataaggaaggctggaaaagaaagcaaatggagaaaaaagaatcttgattagaaaaaaaagcttcaaaaatttgtggattaaataaaaaaccgtatctttgcagcgtcaaaatcaaaacgggtgttttgataggaaaattgggatatggtgtaatggtaacacaacagattctggtcctgtttttccaggttcgaatcctggtatcccaacacataaaccacttattaaagacaaagttcttctaaaattgcaattttagaagaacttttttcattttgggctagctatcttaaaaatagaccaatcaaaattggtgtcaactctctatttttccgtaagactcatgaaaaaagcggggcagtccgaaaacaatgcaacgccaatccgggagtaattcggggttttgctttctctcaattgttctatttgtcttttttagtaggccatgaaaacacgcaggatgaaaaaggtgcaaaaaatcagtagtacgttagtaaaaaaagagtctaacgcatttgcattaaactctttttataactgtttttattcgtctttcattgattggtcaatcacctctattttttttaagatcaattctaggtctgccttgagtttttccactttacgattcatttccgtaaccaaactgctaccttttttggaagaactggtcaagaagcccaaattgttctcgtatgtttgaatttcattcttcatgttttcgtaagcacgaaccagtttttcgcgttcacgataaaggttgccttccttgctgatgcttgatttaaagttacttaattttttctgtgatgcggaaagattcaacttgtcaaacaacttatcaatgacaccatgatattgcttgtataatttatctttctctttaaacggtacatgaccgatgctattccattctttcattaattctcgaatggtgtttccggcatcttcttccggtgtttcctgtgcgtcaattgtatttaacttttcaatgatcgcctttttctgaaccatgttttcctgttcaactgagcgttgtgaagaagtcgccttgttcttttgctcgaagaaataatcacatgcggcaatgaatcgtttccatacggcatccgaatactttttaggtacaggaccaattgttttccattccttttgtaatttgcttagaatatcagcagttgctttccagtctgtgctttcttttagtgcttctgctttttcacataatgctttcttcttttccagattacctgccatactttccttgatggacttgaagaactcggctttgcgtttgaaaaattcatcacaagcggcacggaaacgttcgaatatcttcacgttcattttttgaggtgcgtaaccaattgttttccatttggcttgcaaagcaatgatttcctgagttttgttttcccagtcttggaaggtagtgaacgtatcgtattccatcgcttccacaatttcacagattacggtcttttcatccaagttacgttgctctttttcttttaaggcttcgaaatgttgctggtgacgacggtttacggctgtagaggcggttttgaaccgggtccagatatcttcgcgcaattcttttgcaacaggacccgtattccggaattcctgatgtaacttttgtaattgatggaaagcggaaatcacatcttcttcatcagccaatttctctgcggcttcacaaagatgagtctttatttcaaggttctttttaaaatcatactcacggaattcgttgttcaactttatcaagtcatagaacttttctgcatagtgctgataatttttccatagttcattgactttggcagccggcacctgttttatatcgttccattcctgttgcagtttcttgaattcattgtatgctttgttggcatcttcgggagattcggcaagttctttcaagcggtcgataatggcgagctttttcaccaggttatcttctttttctttatcttgttctgcttgtatggcgcttcttttctctttgatagagctcatgatatctttgaaacggctttcagcatcgtccggttggggaataaatgcctcaggagcacctccgccatcaataaatgccttacgggcggcttcttgctcagccttgtgcagcttgtagaagttctgtttcaataaatccaactcttgtttgtctgcattgcaggcgtcttcgttgatttcttttaaacgttcgatgacctcttctttcgtttgtttaggtacatacgtagcgttattttcttctgcagtagcggaagatgataccaaagtttcagatgtctgttccactggaacttcggttaaagggcggatagtttcattcgagtccatcgtatagatttttaaagtaagcgtttttgttataacaacaatttacaaattaaaagaaataaattagaacttcatactgtttttcccgatttttttaggaaaatccttaaaagtggagaaaataggagaatcaagggggataaatgcactgcagattacatagattcatacagattctcttttattgtgattctttgccggtttctgtgtgaatctgttttttctctgaatttcaatctatgtaatctgtagtgaaacgtgtcaggatagtaatacggtgatgcccatataaagcatcatacctataatgtcattggtgatggatatgaacggacctgtagcgatggccggatctatttttagtttttccagtgtcataggaaccagggtcccaaagatggaagcgaacatgactactgcaaacaggctgaatgaaaccgaataagtcacggtggcacttgccccgaaacggatgaaattatagatatataccagcatagaaataatagtagcattgattacggccactacagattcctttactatttgtttccaggtgttttgggcatccagcgagctgtttgccagtccttgtacgataagtgccgaggactgtgttcctacgttaccgcctgttccgccgataagggggatatagagggccatttcgggatgtgcggcaaaagtactgtcaaagttgcccagaatcatggagttgcctattccgcctatcatgccgatgagcagccagggcagacgggctgtagtctggcggaatacattatcgtctgtttccacgtcttgtgacaaacctgatgccagctggtagtcgcgttcagcctgttcacgtacttcgtccatcacatcgtctaccgtaatccgtcctaccaggcgtccgatactgtccactaccggaacggcgaccaggtcatatttttcaatggtttgtaccacttcgtctataggggtatctacatggacggatatcggttctttcctcatcacgtgcttcactttggatacggaagggctggtgatcattttcttcaacgggaacacaccgcgcagccgctggtcatcgtctactacatatacataatagatttcgtccatatcttccgcctggatgcgcatttccttcagacattcgggcatactccagttttcgtttacgattaccatttcggtacccatcaatccaccggcagtgtcttcgtcatatttcaacaaatcgacaatgtctccggcttgttctatgtcttcaatgtgtgagagaacttcttcttgtttgtcctcgtccatttcacggataatgtccacggcatcatccgaatccatgtagtcaacgaaccgtttggcgattgtttcagagggaaggatttccaggaattccttacgggcgtcttcgtccatttcgataaggacgtcggcggcagtctcattgtccagtaacaggtatatgaaccgtgcttcttccgcatccagttcattgcacagctctgctatgtcggcaggatgtagaccggcaagcaagtccttaagttgctctgagtctttttgctcgatcagctgctctactttttctaattcctctttattcatcctactcttccgttaatataataaataggtgttattctttcttgtttgttcctttccgggcgatatcgttactgtaaactatatccgttttatttttcagtgccgcttccactctgttagtcagttcgataaactctgatacagacaactgttccgggcgtttgttgaaaatcaggtctgcgctcaatggattctctttgtctaaaatggaagaaatagaatttctcaaagttttacgccgttggttgaatgttgtttttacaatgagcttgaacaatttttcattgcatcccagttccgtcgtttcattgcgtgtcatacggatgaccgcacttttcaccttgggaggcggattgaatacatgttcgtgtacggtgaacaggtattctactttgtaccaggcttgtatcaggatactgagaatgccgtatgtcttgcttccgggaccggcggcaatgcgttcggccacttctttttggatcattccggtacaacagggtatcaggtctttgtaatccagcattttaaagaatatctggctggatatattataagggtagttgccggtcagaacaaaaggtttcccgtcaaataatttttcgaggttcagtttcaaaaagtcgtcttcaatgatattatcttccaaggcaggaaagttctcacggagataggttacagattcatagtccagttccaccacttttaccgcacggtttttctgcataataaactgggttagtacccccatccccggtcctacttccaaaattggcaagtcagggcacacatctactgtatcggctatatcttttgcaatactgagatctttcaagaagtgttgtcctagaaatttttttggctttactaatcccattccgttatttttctatcgtttataaataggtttatttcgctaagatagtatctttgcatcgtgcaaaggtaaacattctaaattaatatacacagattttggaacgaactcgattaaaaaagattataaataaaggtttgcagattgcatttccgttatttttgggggctgcgatactgatatggatgtatcacggattcaatttttcccgggtatgggaggtcttgaatggaggaatgaattattggtggatgttagtgtcattagtgtttggcgtgtttagtcatatttttcgtggctggcggtggaagcttacgctggctccgttgggcgagcatcccaaaacatccgattgtgtgtatgccatctttgtgtcttatgccgccaacttggttgttccccgtgtaggtgagatttcccgttgcggggtgttggctaaatatgatggtacatctttttccaaatcgctgggtacggtggttgcggaacggttgattgatacgctgtgtgtgtcgttgattacaggggtaactcttataatgcaggcaagagtgttcgatactttttttaaagaaaccggtacggataccacggttttggcacaggtatttacttcggggcatttctatatcactatcgtctgtgtgctggccgtattggtgctggctttttttctgatcaggaatgtgacggtctttgccaaagtgaaaggcattctccataatgtatgggtcggtgtactgtctttgcgccatgtaaagcggatgcctctgttcattctttataccgtcggtatctggacttgctatttcctgcaattctatgtttccttcttttgtttcgatttttctgatgatttaggtgtgatggcaggattggtgatgtttgccgtaggtagcattgcggtagtggttccgactcctaatggggcgggtccgtggcattttgctgtcataacgatgatgatgctctatggagtaggaaaagaagatgcgggaatttttgccttattagtgcatggaatacaaacttttttattaattttgttgggtatatatggattagcggctttgccgttcacaaataaaactaagaagttatgagtacaattctctctctcgctccgcagaatgtgtggaagcatttctattcattgactcaggttccccgtccttcgggctacttgaagaaggttcaagagttcttgctgaactttggaaaaagtgtaggcgtagagtcattccaggatgaagccggtaatatcatttatcgcaagcctgccactccggggatggaaaaccgcaagaaggtgattcttcaggcacacatggacatggttcctcagaagaataacgatacagtgcatgattttgaaaatgatcctatcgaaacttacattgacggagattgggtgaaagctaaaggcacgactttgggagctgatgatggtatgggtgttgccgctatcatggctatcatggaagataaaacgctgaaacatggtccgttggaggcactgattactgccgacgaggaaacaggtatgtttggtgcgttcggcttaaagccgggaacggtagacggtgatattctgttgaatctggattcggaagaagaaggagaattgtatatcggttgtgcaggcggagaagacctgacagctgtgttggaatataaagaagtggaaacagatccggctgacatcgctttgaaagttaccttgaaagggctgcgcggtggtcattccggattggaaatcaatgaaggacgtgccaatgccaacaagctgatggctcgtttcatgaatcaggtgataacttacgatgaggcttgcctggtttcctggcaaggtggcaatatgcgtaacgcgattcctcgtgaatgtgaagtcgttattacagtgccggctgatgaagaagcggacgtactggactatgtgaaggagtgcgaagaattgtggaatgaagagtatcatgtacacgaaactccgatcagcttcaaggcagaacgtgtggaattgccgaagatgatggttcccgatgaaatcaaagataatctggtggatgccatttatgcttgtcaaaatggggtaatgcgtatgattcctactatccccgatactgtagaaacctcttctaatctggctatcgtttctatcggtggtggcaaggcggagataaaaatcttggcccgtagctcgcgtgactcgatgaaggattatctgaatactgcattggaaagctgtttctctatggcaggcatggaagtgacccgttcaggtggttattcaggctgggagcccaatgtggattctcctattctgaaagcgatgaaggagtcttatcaggcacaattcggtaaagaacctgctgtgaaagtgattcatgccggtttggaatgcggtatcatcggtgcggtagttcccggcttggatatgatttctttcggtcctaccttgcgttctcctcactcaccggatgaacgctgctttattccttctgtaggtaagttctatgatttcgtagtagctacgttggaaaatacgccggtaaaagaatagtctttaagatcttataaagatttcgggcgcggatgatagggatttcgtccgcgcctttctattaatattccactttgtcacttttctctgtccattgttggaatgcctttatcgcctcttccgccaaaagaacttcggaaggcagcttacgtgccgaaggtttcagccttaactcatcatagataaaagagtcgtcaaaacctatattcttggcatccgtcttgttgtttgcataatacattttatccagtcgtgcccagtaaatggctcccaggcacatgggacacggctcacacgaagtataaatttcacacccactcaggttgaatgttcccagtttggttgccgccgcacggatggcgctgacttccgcatgggcggtagggtcgcattgagaagtgacgcgattgactccggtcgcaatgatttcaccatctttggcaattacagctccaaagggtccgccgccgtttgccacgttctctatagaaagctcaatggctttccgcattaattcttctttcttcatagtggttctatttctttttgtacagagcaaatatactatttttctgccaatgaatgctgtcaatttgtttatttcgtatttagaagtttgaggccggacatctggctgcttaatgatattttttcagaacttggttgaatcagcaagtgaatttcttgcaggtctcaatattttttgtgaatattacaccttgattgcatgttttgtgacactgagatatgaagcagactttattgaaattagacaagttggattttgacgagatgtacaccatctattttccaaagttggtacgtttttcccaaacctatctgtttcttcaggaagatgcggagaatgtagttcaggatatctttctgaaactttgggagaaccgtgaacagttatcatttgaggggaattttaatgcttatcttttcacgatagtcaagaatcgttgtatcgacatactgcggaaagaatgtcgggaagggtccgaacgttactctttttcatcggtagagcgtcaggaacttgagtttaaattgtattccttgcagaagtttgacgaaaattctttttctttctttgaaatggagcgtattcttcaacaggccatagagtcgcttcctgaacgttgccgggagatttttagattgagccgtatggagggcttgcaaaataaggaagtagccgcccggcttggcatttcggtgaatacggttgaagggcaaatgagtatcgcgcttcgtaaacttagggtggcgctgaaagattaccttccttttttgatctttatgtgttaattactgtttattttgaactttcttttggtggctgtctttcttcctgtcgttctaatgttatacagaacaaaaagaacgtttggtgaaatatggaagaatatctgcacaagtattttttaggtatcatgactgaccccgaaaaggagcggttttttgaagaattggaaaaagatgcggcattgaaagaagagtttgcggcattacaaaactccatagctctttccggtctgatggaagaagaaggtgatgagcggatggcttccgtcaagctgaaagagctaaagcggatggcggcaaagcggcgtaccctccgtctgtcgtggaagatggtgaagtatgcggcgatgatactgctggtgatcggcacatggcttctttccaaagaatataatttggacatttatagcagggaatatacgtgggtgcaggctcctaaagggcagcgggtatatgtcactttagcagatggaactacggtatggctgaatccttgcaccaggctgaaagtgcctaatgtgttcgatgccagacagcgtatcgtggagctggaaggtgaaggctttttcaaggtgatgaaaaatgcggaagctccttttattgtgaagacagacaagtatgatatacgggtattgggcacagagtttaatgtgttcgcttatccagaccgggacgattttgagacggaactggtcacaggttctgtctatatttgtgacagggaggagaacgggcaaggtatttacctgaaacctgatgagaaagcaatcgttttgaacgggcgtctgcataagttatcttcggaatataaacagcggcaactgcaaaccagtggcatctatacctttggagaccagcctttcggagagttgctaaagcggctggaattgtggtatgaagtgaaattcatagtgaagaatccggaaatcttaaaacaggtttatagcggtaagttccgtcagaacgacagtatagaaagtatattacaagcgattaaagatgtgggtaaattccaataccgcattttgtcggataaagagattgaaatattttgattaatgtataaccttaataacgaatatgcctatgtaaaaacacacttgaatctatttttaagcttatgcgttagattaatgatataaaaaaaggagagtactgcaactaccctccttcccaaaggattatcctgatatatattgactaatgctcctaaaatcagtacttaataacccttttattttgcgaagttatgaaaaaaacactacgtattatgaaatttacacttttttttattttttgtcttttaatgcagctgcatgcggaaaatacttattcgcagacagcaaatgttaatcttaatggaagttcgttgactttacaggaacttatttcagagattgagaatcagacgggctatttgtttatttatagtaagcaggatgtagacttgaatcagaaactgaaggtcaaaactgtcggtaaaacggttgcagatattttgaataaagcttttaaaggaacagaacttaattataaatttactaataattatatctctctgtataaaaaaggaacagtcgaactagaaactgtcaagcaggatgagaagaggcggatagtaaccggacgtgtgacggatatccaaggcgaatccattataggagccaatgtaatagatattaaaagtaaaactggtactataactgactttgacggtaattttagtttgtccgtaggcgaggatgctgtactagtcgtatctttcattggctatatagagcagagaattactgtaaaaggaaatacacccttgcatattaatctgaaagaagatacccagaaacttgatgaagtgatagtggtgggttatggtagtatgaagaaaagcgatcttactggttcggtggtgtctttgaaagctgatgatatcagcagtcctaataactctagctttgtgcaaatgatgcaaggaagggcagccggtgtggtggtaactcaaagcagcgcgcagccaggtggagcggcatccattaaaattcgcggtacttcttctgtaaatgctggtaaaacgccgctttacgtcgtagatggtttcccgatagacaacacaaatttttatccgggttcgggcgatgtgtttgatggtcctaaaagagacccgttgaatagcatcaatccttcggatattgaaagtatggaagtactgaaagatgcttccgctaccgctatttatggttctagagctgccaatggcgttattttgattactaccaagaaaggtaaagagggaaaagctagaattacattcaactcgtcttttggtatgcaagttatagccaagcgttttgatgtattggacggaagagaattcgcacaggtgtataacgaaatgcaggtgctcaatggcagagaaccttattataaagacgttgagtcgtttggtaaaggtaccgattggtttaaggaggttacccgtacgggtatggttaccaatcacgatgtcacgatgcaaggagggaatctgaatacaaaatatttggtgtcaggcagctatcaccgcaatgaaggtattgtaaaaggcagttcgttcgaacgttatagctttcgtttgaatttagatcagaagatttcggagaaactgaactttacgataaccagcttgttgagtaatactacggataataatatcattgccggaacacgtgccgaagataccggtgtgctgggcggtgcttatgcttttccgtccaatgttcctgttcgcaatgaagaaggaaaattttcagataatccccattatgtgttgatgtccaatccagtttctttgcttgatattgatgataaaacccgttctaggcgtattatgttgaatgcatcgttgacttatactcctacggattatctttttttcaagattcagacaggtatggatatgcagaacgcaaaacgcgagtattacaatcctaccactacacgtaaaggtgcgggtgcgggaggtatagcgtcggttaccgctacacaaggtggcagcaacttgttggaagctacggctacttttaaaaaaagctttggcaagcataaacttgatgtgttggcaggttatacttatcaggattttctttttgaagacttgagcgctaaggctactaatttttttaccgactattttggatataacaatatcggtattggggaagagcgcccgtctgtgggtactaccaaatcaaagaatgtgctgatctcgggtatcgcccgtgccaattataattatgatgaccgttatttatttacggctactttccgtgcggacggttcgtccaagttcgaaaaaagcaagcgtttcggttattttccctccttttcggcggcatggcgtatttctaatgaggcattcatgaaggatttcacgagcttatccaaccttaaattcagaatcggttacggagaaactggcaaccaggatatcggtaacaacagttatatgacattgctgggaaaaggttatgtctatatttttggagaccgcgtggtatcgacactggtacctaataatgctggtaacccgttgctgatgtgggaaacagccaagcaattcaatgtaggggttgatgccggattctttgataacaggatttctgctacattggaatactatcagactactacggataacctcttgcttgaatttgctacacccgcctattcgggttatgcaagccaatggagaaatgcaggtaagattcagaacaagggagtggagttcacactcaatacccgtaatatcagcactcgtgacttccagtgggaaacgactttgacagtcactcataataaaaacttgtggaaagaccgtgccggactgcctttgccccaactcggtgcatcggaacacgatccggtcaatgctatctatggttatgtgttcgatggaatatggcaggaaggagatgatatcaagggcagtgcgcagcccaattccgtacctggaaatatccgttatgctgatatagggggacgcgatgaggatggtaagttcaggttgggacctgatggaaaaattgatgcggctgatattacctatttgggaactcccgatcctaaggtagagtttggatttggtaatgatttgacttacaagaactggaattttaatttcttttttaatgcacgtgtgggtggaaaaacgtttaatcagttcagatcttattatgagaatcctgctcgtgtatttgaaggagtgaacgcttttaaaagtgtcatgaatcgctggacacctactaatacgaataccaatatccattctggaatgagtaatccttatggaagtgaatacaattcattgtatatagaaaatacttcttttctgcgactaaaatctgtccgtctgacttacaatactcggataggggctgttccttgcagtgtatatgtggatgcgcagaatgttttcaccatcactgattacacagggtatgatccagaagtagacggttcatacaatggttatcctccttgtcgtacatttatggctggtttaagagttagtttttaaataaaaaatagacatcatgaaaaaacttggaatatatattgttgcaactgcaagttgctttttttcttcttgtttggatacagaattatatactacgatacctgtggatgatttttttaagactgaagcggatgctcaagcatacttgaacggagtatatggaggatttcgagataggagtgcccgttgttacattcctgctggagagtacgcctatcagatgttgaatgaagtggcgggagcgaatttgatttttggcccaggggcacagaaaggtgatcaacttatgatggaaaaggcagagtggggagtcgatttctacgtcacttcttctttgtggatggacttgtatatgggcatcagccgcgcaaacattggtattgataatttgaagaaacagccgcagacgccggccttggagcgttttatcgcagaaactcgcgtgatacgcgcttatttctatgctgatttggtttatttgtatggagacgttccttttattaccacttctaatttcgatttgatgtcgaagccgggcaggacttctaaggatgaggttatcaagttctgtattgacgagataaaggatgccatggataaattgccggatagttatcctgctaaagattatggacgtttcacaaaatggggtgcgaaggcgaaactttgtaaaatatacttggaagccaagatgtggaaagaatgtgctgagattgctaacgagattattacccagtcacctcatagactgattgaggattacagcaagttgtggggagtagaaaatgagaagaatgctgaatttctttttgtcattccgagtcttcctccgcgttatcagcattccgcatacgctgcccattttcagccagctgattttctgaatccggatggaacggtgataggatgggattactaccgcgccacatgggaattttataattcattcgatccggcagataagcgcagggcggatttgctgacatcgtataaagcgaaagtaaaaggcgagattgtagtgaaagaagtggggcatggaataggtgaaggtcctatcccgaataaatttccgttggaccccgctcacatagattggacagaaggtactgatgttgtattgcttcgtttggcagatattatcttggcgcgtgctgaagcattgaacgaactaaatggtccttctcaggaggctgttgatttgataaacaaaatacgtgaaagagcttttggtaatgcggagcataacctgaagctggctgattatccgtcgaaagacgcgctgcgtgccgctatcttgcaggagagaagctgggagttgttcctcgaaggctacaaccgcatggatttgatccgccacggagtgtatattgagaccatgaagaagaaaggttcgaccaacgtttcgaccaatcatcttttgttgcctattccgcagtccgaactgaatatgaatccaaatttgacacagaatccttattgacgggaataaaaggttgttgttttttgggtgaaaagatattttcaggataacacaataacgtattaagaatatagttgtgattatgtgcggaggctgtttcgggagaggggcggaaaaaatgtccgttttcttcttgggcagcctcttctttttttatattagaaaggaaaaggatatgtatgcgaagtttattattttagtatttttatggggaataatccggttggcggcggaagcccaacctgcgggatggtcgctacccactcctcaaaaccagctttcgacaagtcttatcccttatcctgccgaggtgaccggagggaagggaacagtccgcttctcttgcctgaagctggcgggaggcggaggcgttgaacagtttccgcagcttcgggaggaactggaagatgtggcgctggaccggggcatggttgccggcgggaaagactgcctgtctgtccggtttgtcctgggcggctctttaaag
